(19) United States
(12) Patent Application Publication
(10) Pub. No.: US 2016/0281111 A1
(43) Pub. Date: Sep. 29, 2016

(54) CRISPR/CAS-MEDIATED GENE CONVERSION

(71) Applicant: Editas Medicine, Inc., Cambridge, MA (US)

(72) Inventors: Cecilia Cotta-Ramusino, Cambridge, MA (US); Jennifer Leah Gori, Jamaica Plain, MA (US)

(21) Appl. No.: 15/081,456

(22) Filed: Mar. 25, 2016

Related U.S. Application Data
(63) Continuation-in-part of application No. PCT/US2015/059782, filed on Nov. 9, 2015.
(60) Provisional application No. 62/138,948, filed on Mar. 26, 2015.
(60) Provisional application No. 62/182,416, filed on Jun. 19, 2015.
(60) Provisional application No. 62/194,078, filed on Jul. 17, 2015.
(60) Provisional application No. 62/220,660, filed on Sep. 18, 2015.
(60) Provisional application No. 62/232,675, filed on Sep. 25, 2015.
(60) Provisional application No. 62/232,683, filed on Sep. 25, 2015.

(51) Int. Cl. C12N 15/90; A61K 48/00; A61K 38/46; C12N 9/22

(52) U.S. Cl. CPC C12N 15/907; C12N 9/22; A61K 48/005; A61K 38/465; C12Y 301/00

(57) ABSTRACT

CRISPR/CAS-related compositions and methods for altering a cell or treating a disease, for example, by gene conversion, are disclosed.

### RELATED APPLICATIONS

[0001] This application claims priority to U.S. Provisional Patent Application No. 62/138,948, filed on Mar. 26, 2015, and to U.S. Provisional Patent Application No. 62/182,416, filed Jun. 19, 2015, to U.S. Provisional Patent Application No. 62/194,078, filed on Jul. 17, 2015, to U.S. Provisional Patent Application No. 62/220,660, filed on Sep. 18, 2015, to U.S. Provisional Patent Application No. 62/232,675, filed on Sep. 25, 2015, to U.S. Provisional Patent Application No. 62/232,683, filed on Sep. 25, 2015, and to International Application No. PCT/US2015/059782, filed on Nov. 9, 2015, the entire contents of each of which are expressly incorporated herein by reference.

### SEQUENCE LISTING

[0002] The instant application contains a Sequence Listing which has been submitted electronically in ASCII format and is hereby incorporated by reference in its entirety. Said ASCII copy, created on Mar. 25, 2016, is named 2016-03-24_126454-00420_ST25.txt and is 1.77 megabytes in size.

### FIELD OF THE INVENTION

[0003] The invention relates to CRISPR/CAS-related methods and components for increasing editing of a target nucleic acid sequence by gene conversion using an endogenous homologous region, and applications thereof.

### BACKGROUND

[0004] The CRISPR (Clustered Regularly Interspaced Short Palindromic Repeats)/Cas (CRISPR-associated) system evolved in bacteria and archaea as an adaptive immune system to defend against viral attack. Upon exposure to a virus, short segments of viral DNA are integrated into the CRISPR locus. RNA is transcribed from a portion of the CRISPR locus that includes the viral sequence. That RNA, which contains sequence complimentary to the viral genome, mediates targeting of a Cas9 protein to the sequence in the viral genome. The Cas9 protein cleaves and thereby silences the viral target.

[0005] Recently, the CRISPR/Cas system has been adapted for genome editing in eukaryotic cells. The introduction of site-specific double strand breaks (DSBs) enables target nucleic acid alteration. After the formation of a DNA double-stranded break (DSB), the major decision point affecting DNA repair pathway choice is whether or not the DNA ends are endo- and exonucleolytically processed in a process referred to as end resection. When no end resection takes places, the repair pathway engaged to repair the DSB is referred to as classical non-homologous end joining (C-NHEJ). The C-NHEJ repair pathway leads to either perfect repair of the DSBs, in which case the locus is restored without sequence alterations, or to the formation of small insertions and deletions.

[0006] In contrast, if the end resection machinery processes the DSB, a 3′ overhang is exposed, which engages in homology search. A not yet completely characterized class of pathways that can engage the repair of DSBs after resection is initiated is referred to as alternative non-homologous end joining (ALT-NHEJ). Examples of pathways that are categorized as ALT-NHEJ include blunt end-joining (blunt EJ) and microhomology mediated end joining (MMEJ) leading to deletions, as well as synthesis dependent micro homology mediated end joining (SD-MMEJ), leading to the formation of insertions.

[0007] When the end resection is extensive, the exposed 3′ overhang can undergo strand invasion of highly homologous sequences, followed by repair of the DSB by a homology-dependent recombination (HDR) pathway, which encompasses gene correction and gene conversion. Gene correction refers to the process of repairing DNA damage by HDR using an exogenous nucleic acid, e.g., an exogenous donor template nucleic acid. Gene conversion is a process whereby a DNA break leads to repair of the sequence in the vicinity of the break by an endogenous homologous sequence, referred to as an endogenous donor template sequence. An endogenous donor template sequence can be derived from a non-sister chromatid sequence or from a heterologous sequence that has a high degree of homology with the sequence undergoing repair. The DNA sequence that is converted can comprise a small portion of a gene (e.g., fewer than 100 bp) or an entire gene sequence (e.g., greater than 5 kb). Gene conversion is a common form of DNA double-strand break repair in both non-mammalian and mammalian, e.g., human, cells.

[0008] While a cell could, in theory, repair DNA breaks via any of a number of DNA damage repair pathways, in certain circumstances it is particularly useful to provide an environment more favorable for repair of a break by gene conversion using an endogenous homologous region as a donor template. However, there remains a need to improve the efficiency of gene conversion-mediated modification in order to broaden the applicability and efficiency of genome editing by CRISPR/Cas systems.

### SUMMARY

[0009] The methods and compositions described herein surprisingly increase DNA repair via gene conversion pathways to alter or modify, e.g., repair, sequences, e.g., genes, such as disease causing genes, using an endogenous homologous region which functions as a donor template, following a Cas9 molecule-mediated cleavage event. In one embodiment, the endogenous homologous region is, for example, a sequence of a non-sister chromatid or a heterologous sequence from a different gene that has a high degree of homology with the sequence undergoing repair. In one embodiment, introduction of two 5′ single-strand breaks by a targeted Cas9 nickase increases the rate of DNA repair via gene conversion.

[0010] In one aspect, this disclosure relates to methods and compositions for modifying a target gene in a mammalian cell, involving contacting the cell with first and second Cas9 nickases and first and second (non-naturally occurring) guide RNAs (gRNAs). The first Cas9 nickase and the first gRNA generate a first single strand break on a first strand of the target gene, while the second Cas9 nickase and the second gRNA generate a single strand break on a second strand of the target gene, thereby forming within the target gene a double strand break having two 5′ overhangs. The double strand break having two 5′ overhangs is then repaired by gene conversion using an endogenous homologous region as a template sequence, thereby modifying the target gene to comprise a sequence that is identical to the endogenous homologous region.

[0011] In one embodiment, the endogenous homologous region is located on a chromosome on which the target gene is located. For example, the endogenous homologous region may be located in a region of a gene that is homologous to the portion of the target gene to be altered. In some embodiments, the endogenhous homologous region is located within a gene cluster comprising the target gene. In one embodiment, the target gene is an HBB gene, and the endogenous homologous region is a region of an HBD gene. Alternatively or additionally, the target gene to be modified can comprise a sequence (for instance, a point mutation, insertion or deletion) linked to a disease, while the endogenous homologous region sequence does not include such a sequence (for instance, a point mutation, insertion or deletion) linked to a disease.

[0012] Methods according to this disclosure may be used to alter the genotype of a cell, for instance, to treat a disease, such as sickle-cell anemia, beta-thallessemia, spinal muscular atrophy and/or chronic granulomatous disease.

[0013] In another aspect, disclosed herein is a method of modifying an endogenous target gene in a cell, the method comprising contacting the cell with a first gRNA molecule, a first enzymatically active Cas9 (eaCas9) molecule, a second gRNA molecule, and a second eaCas9 molecule; wherein the first gRNA molecule and the first eaCas9 molecule associate with the target gene and generate a first single strand cleavage event on a first strand of the target gene; wherein the second gRNA molecule and the second eaCas9 molecule associate with the target gene and generate a second single strand cleavage event on a second strand of the target gene, thereby forming a double strand break in the target gene having a first overhang and a second overhang; and wherein the first overhang and the second overhang in the target gene are repaired using an endogenous homologous region, thereby modifying the endogenous target gene in the cell.

[0014] In one embodiment, after repair of the first overhang and the second overhang, the target gene comprises the sequence of the endogenous homologous region.

[0015] In one embodiment, the cell is not contacted with an exogenous nucleic acid homologous to the target gene. In one embodiment, the cell is not contacted with an exogenous template nucleic acid.

[0016] In one embodiment, the first overhang and the second overhang are repaired by homology directed repair (HDR). In one embodiment, the homology directed repair (HDR) is gene conversion.

[0017] In one embodiment, the first overhang is a 5′ overhang. In another embodiment, the second overhang is a 5′ overhang. In one embodiment, the first overhang is a 5′ overhang, and the second overhang is a 5′ overhang.

[0018] In one embodiment, the first overhang and the second overhang undergo processing, exposing a first 3′ overhang and a second 3′ overhang. In one embodiment, the processing is endonucleolytic processing. In another embodiment, the processing is exonucleolytic processing.

[0019] In one embodiment, the method is used to correct a mutation in the target gene, wherein the mutation is located between the first single strand break and the second single strand break. In one embodiment, the method is used to correct a mutation in the target gene, wherein the mutation is located within fewer than 50 nucleotides of the first single strand break. In one embodiment, the method is used to correct a mutation in the target gene, wherein the mutation is located within fewer than 50 nucleotides of the second single strand break.

[0020] In one embodiment, the method is used to correct a mutation in the endogenous target gene, and wherein the first gRNA molecule positions the first single strand cleavage event 5′ to the mutation on the first strand of the target gene. In one embodiment, the method is used to correct a mutation in the endogenous target gene, and wherein the first gRNA molecule positions the first single strand cleavage event 5′ to the mutation on a first strand of the target gene, as shown in the diagram below:

[chemical structure]

wherein X₁ is the first single strand cleavage event and M is mutation in the target gene.

[0021] In one embodiment, the method is used to correct a mutation in the endogenous target gene, and wherein the second gRNA molecule positions the second single strand cleavage event 5′ to the mutation on a second strand of the target gene. In one embodiment, the method is used to correct a mutation in the endogenous target gene, and wherein the second gRNA molecule positions the second single strand cleavage event 5′ to the mutation on a second strand of the target gene, as shown in the diagram below:

[chemical structure]

wherein X₂ is the second single strand cleavage event and M is the mutation in the target gene.

[0022] In one embodiment, the method is used to correct a mutation in the endogenous target gene, and wherein the first gRNA molecule positions the first single strand cleavage event 5′ to the mutation on a first strand of the target gene, and wherein the second gRNA molecule positions the second single strand cleavage event 5′ to the mutation on a second strand of the target gene. In one embodiment, the method is used to correct a mutation in the endogenous target gene, and wherein the first gRNA molecule positions the first single strand cleavage event 5′ to the mutation on a first strand of the target gene, and wherein the second gRNA molecule positions the second single strand cleavage event 5′ to the mutation on a second strand of the target gene, as shown in the diagram below:

[chemical structure]

wherein X₁ is first single strand cleavage event, X₂ is the second single strand cleavage event, and M is the mutation in the target gene.

[0023] In one embodiment, the mutation is a point mutation (GAG to GTG) in the sense strand of the HBB gene, which results in the substitution of valine for glutamic acid at amino acid position 6 in exon 1 of the HBB gene.

[0024] In one embodiment, the cell is a population of cells.

[0025] In one embodiment, the first single strand cleavage event results in a first 5′ overhang, and wherein the second single strand cleavage event results in a second 5′ overhang.

[0026] In one embodiment, the endogenous target gene has at least 80% sequence homology with the endogenous homologous region. In one embodiment, the endogenous target gene has at least 85% sequence homology with the endogenous homologous region. In one embodiment, the endogenous target gene has at least 92% sequence homology with the endogenous homologous region. In one embodiment, the endogenous target gene has at least 95% sequence homology with the endogenous homologous region. In one embodiment, the endogenous target gene has at least 80%, 81%, 82%, 83%, 84%, 85%, 86%, 87%, 88%, 89%, 90%, 91%, 92%, 93%, 94%, 95%, 96%, 97%, 98%, 99%, or 100% sequence homology with the endogenous homologous region.

[0027] In one embodiment, the method is used to correct a mutation in the endogenous target gene, and wherein the endogenous homologous region comprises a domain which is homologous to a domain in the endogenous target gene but which does not comprise the mutation.

[0028] In one embodiment, the endogenous homologous region comprises a control region which is homologous to a control region of the target gene, a coding region which is homologous to a coding region of the target gene, a non-coding region which is homologous to a non-coding region of the target gene, an intron which is homologous to an intron of the target gene, or an exon which is homologous to an exon of the target gene.

[0029] In one embodiment, the first eaCas9 molecule is a first nickase molecule and the second eaCas9 molecule is a second nickase molecule. In one embodiment, each nickase molecule forms a single strand break in the target gene. In one embodiment, the first eaCas9 molecule and the second eaCas9 molecule are the same species of eaCas9 molecule.

[0030] In one embodiment, the eaCas9 molecule comprises HNH-like domain cleavage activity but has no N-terminal RuvC-like domain cleavage activity. In one embodiment, the eaCas9 molecule is an HNH-like domain nickase. In one embodiment, the eaCas9 molecule comprises a mutation at an amino acid position corresponding to amino acid position D10 of Streptococcus pyogenes Cas9.

[0031] In one embodiment, the target gene is an HBB gene. In one embodiment, the method is used to correct a mutation in the HBB target gene, wherein the mutation in the HBB target gene causes sickle cell disease or beta-thalassemia. In one embodiment, the mutation in the HBB target gene is a substitution of valine for glutamic acid at amino acid position 6 in exon 1 of the HBB gene. In one embodiment, the endogenous homologous region is in an endogenous HBD gene.

[0032] In one embodiment, the first gRNA molecule is a gRNA molecule comprising a sequence set forth as any one of SEQ ID NOs: 387-485, 6803-6871, or 16010-16256, and the second gRNA molecule is a gRNA molecule comprising a sequence set forth as any one of SEQ ID NOs: 387-485, 6803-6871, or 16010-16256. In one embodiment, the first gRNA molecule is a gRNA molecule comprising a sequence of SEQ ID NO:387, and the second gRNA molecule is a gRNA molecule comprising a sequence of SEQ ID NO:16318. In one embodiment, the first gRNA molecule is a gRNA molecule comprising a sequence of SEQ ID NO:387, and the second gRNA molecule is a gRNA molecule comprising a sequence of SEQ ID NO:388.

[0033] In one embodiment, the target gene is an SMN1 gene. In one embodiment, the method is used to correct a mutation in the SMN1 target gene, and wherein the mutation in the SMN1 gene causes spinal muscular atrophy. In one embodiment, the endogenous homologous region is in an SMN2 gene.

[0034] In one embodiment, the target gene is an NCF1 (p47-PHOX) gene. In one embodiment, the method is used to correct a mutation in the NCF1 target gene, and wherein the mutation in the NCF1 gene causes chronic granulomatous disease. In one embodiment, the endogenous homologous region is in a p47-PHOX pseudogene.

[0035] In one embodiment, the cell is a population of cells. In one embodiment, the first overhang and the second overhang in the target gene are repaired by gene conversion in at least 12% of the cells in the population of cells. In one embodiment, the first overhang and the second overhang in the target gene are repaired by gene conversion in at least 15% of the cells in the population of cells. In one embodiment, the first overhang and the second overhang in the target gene are repaired by gene conversion in at least 20% of the cells in the population of cells. In one embodiment, the first overhang and the second overhang in the target gene are repaired by gene conversion in at least 25% of the cells in the population of cells. In one embodiment, the first overhang and the second overhang in the target gene are repaired by gene conversion in at least 30% of the cells in the population of cells. In one embodiment, the first overhang and the second overhang in the target gene are repaired by gene conversion in at least 35% of the cells in the population of cells. In one embodiment, the first overhang and the second overhang in the target gene are repaired by gene conversion in at least 40% of the cells in the population of cells. In one embodiment, the first overhang and the second overhang in the target gene are repaired by gene conversion in at least 45% of the cells in the population of cells.

[0036] In one embodiment, the first overhang and the second overhang in the target gene are repaired by gene conversion about 12% to about 45% of the cells in the population of cells. In one embodiment, the first overhang and the second overhang in the target gene are repaired by gene conversion about 15% to about 45% of the cells in the population of cells. In one embodiment, the first overhang and the second overhang in the target gene are repaired by gene conversion about 20% to about 45% of the cells in the population of cells. In one embodiment, the first overhang and the second overhang in the target gene are repaired by gene conversion about 25% to about 45% of the cells in the population of cells. In one embodiment, the first overhang and the second overhang in the target gene are repaired by gene conversion about 12% to about 40% of the cells in the population of cells. In one embodiment, the first overhang and the second overhang in the target gene are repaired by gene conversion about 12% to about 30% of the cells in the population of cells. In one embodiment, the first overhang and the second overhang in the target gene are repaired by gene conversion about 12% to about 25% of the cells in the population of cells.

[0037] In one embodiment, the cell is a population of hematopoietic stem cells (HSCs). In one embodiment, the first overhang and the second overhang in the target gene are repaired by gene conversion in at least 4% of the cells in the population of HSCs. In one embodiment, the first overhang and the second overhang in the target gene are repaired by gene conversion in at least 5% of the cells in the population of HSCs. In one embodiment, the first overhang and the second overhang in the target gene are repaired by gene conversion in at least 6% of the cells in the population of HSCs. In one embodiment, the first overhang and the second overhang in the target gene are repaired by gene conversion in about 4% to about 6% of the cells in the population of HSCs.

[0038] In one embodiment, the first overhang and the second overhang in the target gene are repaired by non-homologous end joining (NHEJ) in less than 40% of the cells in the population of cells. In one embodiment, the first overhang and the second overhang in the target gene are repaired by non-homologous end joining (NHEJ) in less than 30% of the cells in the population of cells. In one embodiment, the first overhang and the second overhang in the target gene are repaired by non-homologous end joining (NHEJ) in less than 20% of the cells in the population of cells. In one embodiment, the NHEJ results in a deletion in the target gene. In one embodiment, the NHEJ results in an insertion in the target gene.

[0039] In one embodiment, the cell is from a subject suffering from a disease. In one embodiment, the disease is a blood disease, an immune disease, a neurological disease, a cancer, or an infectious disease. In one embodiment, the disease is beta thalassemia, sickle cell disease, spinal muscular atrophy, or chronic granulomatous disease. In one embodiment, the cell is a mammalian cell, e.g., a human cell.

[0040] In one embodiment, the cell is a blood cell, a neuronal cell, an immune cell, a muscle cell, a stem cell, a progenitor cell, or a diseased cell. In one embodiment, the cell is a T-cell. In one embodiment, the method further comprises contacting the cells with CD3/CD28 immunomagnetic beads. In one embodiment, contacting the cells with the immunomagnetic beads increases the level of gene conversion in the cell.

[0041] In one embodiment, the contacting step is performed ex vivo. In one embodiment, the contacted cell is returned to the body of the subject.

[0042] In one embodiment, the contacting is performed in vivo.

[0043] In one embodiment, the method further comprises sequencing the target gene in the cell and sequencing the endogenous homologous region in the cell before the contacting step. In one embodiment, a portion of the target gene is sequenced. In one embodiment, the method further comprises sequencing the target gene in the cell after the contacting step. In one embodiment, a portion of the target gene is sequenced.

[0044] In another aspect, disclosed herein is a method of treating a disease in a subject having a mutation in an endogenous target gene, the method comprising contacting a cell from the subject with a first gRNA molecule, a first enzymatically active Cas9 (eaCas9) molecule, a second gRNA molecule, and a second eaCas9 molecule; wherein the first gRNA molecule and the first eaCas9 molecule associate with the target gene and generate a first single strand cleavage event on a first strand of the target gene; wherein the second gRNA molecule and the second eaCas9 molecule associate with the target gene and generate a second single strand cleavage event on a second strand of the target gene, thereby forming a double strand break in the target gene having a first overhang and a second overhang; and wherein the first overhang and the second overhang in the target gene are repaired using an endogenous homologous region which does not comprise the mutation, correcting the mutation in the endogenous target gene in the cell, thereby treating the disease in the subject having the mutation in the endogenous gene.

[0045] In one embodiment, the cell is not contacted with an exogenous nucleic acid homologous to the target gene.

[0046] In one embodiment, the cell is a population of cells.

[0047] In one embodiment, the endogenous target gene has at least 80% sequence homology with the endogenous homologous region. In one embodiment, the endogenous target gene has at least 85% sequence homology with the endogenous homologous region. In one embodiment, the endogenous target gene has at least 92% sequence homology with the endogenous homologous region. In one embodiment, the endogenous target gene has at least 95% sequence homology with the endogenous homologous region. In one embodiment, the endogenous target gene has at least 80%, 81%, 82%, 83%, 84%, 85%, 86%, 87%, 88%, 89%, 90%, 91%, 92%, 93%, 94%, 95%, 96%, 97%, 98%, 99%, or 100% sequence homology with the endogenous homologous region.

[0048] In one embodiment, the endogenous homologous region comprises a domain which is homologous to a domain in the target gene but which does not comprise the mutation. In one embodiment, the endogenous homologous region comprises a control region which is homologous to a control region of the target gene, a coding region which is homologous to a coding region of the target gene, a non-coding region which is homologous to a non-coding region of the target gene, an intron which is homologous to an intron of the target gene, or an exon which is homologous to an exon of the target gene.

[0049] In one embodiment, the first eaCas9 molecule and the second eaCas9 molecule are each nickase molecules. In one embodiment, the first eaCas9 molecule and the second eaCas9 molecule are the same species of nickase molecule. In one embodiment, the eaCas9 nickase molecule comprises a mutation at an amino acid position corresponding to amino acid position D10 of Streptococcus pyogenes Cas9.

[0050] In one embodiment, the target gene is an HBB gene. In one embodiment, the method is used to correct a mutation in the HBB target gene, wherein the mutation in the HBB target gene causes sickle cell disease or beta-thalassemia. In one embodiment, the mutation in the HBB target gene is a substitution of valine for glutamic acid at amino acid position 6 in exon 1 of the HBB gene. In one embodiment, the endogenous homologous region is from an endogenous HBD gene.

[0051] In one embodiment, the first gRNA molecule is a gRNA molecule comprising a sequence set forth as any one of SEQ ID NOs: 387-485, 6803-6871, or 16010-16256, and the second gRNA molecule is a gRNA molecule comprising a sequence set forth as any one of SEQ ID NOs: 387-485, 6803-6871, or 16010-16256. In one embodiment, the first gRNA molecule is a gRNA molecule comprising a sequence of SEQ ID NO:387, and the second gRNA molecule is a gRNA molecule comprising a sequence of SEQ ID NO:16318.

[0052] In one embodiment, the target gene is an SMN1 gene. In one embodiment, the method is used to correct a mutation in the SMN1 target gene, and wherein the mutation in the SMN1 gene causes spinal muscular atrophy. In one embodiment, the endogenous homologous region is in an SMN2 gene.

[0053] In one embodiment, the target gene is an NCF1 (p47-PHOX) gene. In one embodiment, the method is used to correct a mutation in the NCF1 target gene, and wherein the mutation in the NCF1 gene causes chronic granulomatous disease. In one embodiment, the endogenous homologous region is in a p47-PHOX pseudogene.

[0054] In one embodiment, the cell is a blood cell, a neuronal cell, an immune cell, a muscle cell, a stem cell, a progenitor cell, or a diseased cell. In one embodiment, the cell is a mammalian cell, e.g., a human cell.

[0055] In one embodiment, the contacting step is performed ex vivo. In one embodiment, the contacted cell is returned to the body of the subject. In one embodiment, the contacting is performed in vivo.

[0056] In one embodiment, the cell is a population of cells. In one embodiment, the first overhang and the second overhang in the target gene are repaired by gene conversion in at least 12% of the cells in the population of cells. In one embodiment, the first overhang and the second overhang in the target gene are repaired by gene conversion in at least 15% of the cells in the population of cells. In one embodiment, the first overhang and the second overhang in the target gene are repaired by gene conversion in at least 20% of the cells in the population of cells. In one embodiment, the first overhang and the second overhang in the target gene are repaired by gene conversion in at least 25% of the cells in the population of cells. In one embodiment, the first overhang and the second overhang in the target gene are repaired by gene conversion in at least 30% of the cells in the population of cells. In one embodiment, the first overhang and the second overhang in the target gene are repaired by gene conversion in at least 35% of the cells in the population of cells. In one embodiment, the first overhang and the second overhang in the target gene are repaired by gene conversion in at least 40% of the cells in the population of cells. In one embodiment, the first overhang and the second overhang in the target gene are repaired by gene conversion in at least 45% of the cells in the population of cells.

[0057] In one embodiment, the first overhang and the second overhang in the target gene are repaired by gene conversion about 12% to about 45% of the cells in the population of cells. In one embodiment, the first overhang and the second overhang in the target gene are repaired by gene conversion about 15% to about 45% of the cells in the population of cells. In one embodiment, the first overhang and the second overhang in the target gene are repaired by gene conversion about 20% to about 45% of the cells in the population of cells. In one embodiment, the first overhang and the second overhang in the target gene are repaired by gene conversion about 25% to about 45% of the cells in the population of cells. In one embodiment, the first overhang and the second overhang in the target gene are repaired by gene conversion about 12% to about 40% of the cells in the population of cells. In one embodiment, the first overhang and the second overhang in the target gene are repaired by gene conversion about 12% to about 30% of the cells in the population of cells. In one embodiment, the first overhang and the second overhang in the target gene are repaired by gene conversion about 12% to about 25% of the cells in the population of cells.

[0058] In one embodiment, the cell is a population of hematopoietic stem cells (HSCs). In one embodiment, the first overhang and the second overhang in the target gene are repaired by gene conversion in at least 4% of the cells in the population of HSCs. In one embodiment, the first overhang and the second overhang in the target gene are repaired by gene conversion in at least 5% of the cells in the population of HSCs. In one embodiment, the first overhang and the second overhang in the target gene are repaired by gene conversion in at least 6% of the cells in the population of HSCs. In one embodiment, the first overhang and the second overhang in the target gene are repaired by gene conversion in about 4% to about 6% of the cells in the population of HSCs.

[0059] In one embodiment, the first overhang and the second overhang in the target gene are repaired by non-homologous end joining (NHEJ) in less than 40% of the cells in the population of cells. In one embodiment, the first overhang and the second overhang in the target gene are repaired by non-homologous end joining (NHEJ) in less than 30% of the cells in the population of cells. In one embodiment, the first overhang and the second overhang in the target gene are repaired by non-homologous end joining (NHEJ) in less than 20% of the cells in the population of cells. In one embodiment, the NHEJ results in a deletion in the target gene. In one embodiment, the NHEJ results in an insertion in the target gene.

[0060] In one aspect, disclosed herein is a cell, e.g., a mammalian cell, such as a human cell, altered by any of the methods disclosed herein.

[0061] In one aspect, disclosed herein is a pharmaceutical composition comprising a cell, e.g., a mammalian cell, such as a human cell, altered by any of the methods disclosed herein.

[0062] In another aspect, disclosed herein is a composition comprising: a first non-naturally occurring gRNA molecule, a first non-naturally occurring enzymatically active Cas9 (eaCas9) molecule, a second non-naturally occurring gRNA molecule, and a second non-naturally occurring eaCas9 molecule; wherein the first gRNA molecule and the first eaCas9 molecule are designed to associate with a target gene and generate a first single strand cleavage event on a first strand of the target gene; wherein the second gRNA molecule and the second eaCas9 molecule are designed to associate with the target gene and generate a second single strand cleavage event on a second strand of the target gene, thereby forming a double strand break having a first overhang and a second overhang; and wherein the first gRNA molecule, the first eaCas9 molecule, the second gRNA molecule and the second eaCas9 molecule are designed such that the first overhang and the second overhang in the target gene are repaired by gene conversion.

[0063] In one embodiment, the first overhang and the second overhang in the target gene are repaired by gene conversion using an endogenous homologous region.

[0064] In one embodiment, the double strand break is in the target gene.

[0065] In one embodiment, the composition does not comprise an exogenous nucleic acid homologous to the target gene.

[0066] In one embodiment, the first overhang is a 5′ overhang, and the second overhang is a 5′ overhang.

[0067] In one embodiment, the target gene is an HBB gene. In another embodiment, the endogenous homologous region is in an HBD gene.

[0068] In one embodiment, the method is used to correct a mutation in the target gene, wherein the mutation is located between the first single strand break and the second single strand break. In one embodiment, the method is used to correct a mutation in the target gene, wherein the mutation is located within fewer than 50 nucleotides of the first single strand break. In one embodiment, the method is used to correct a mutation in the target gene, wherein the mutation is located within fewer than 50 nucleotides of the second single strand break.

[0069] In one embodiment, the first gRNA molecule is designed to position the first single strand cleavage event 5′ to a mutation on a first strand of the HBB target gene. In one embodiment, the first gRNA molecule is designed to position the first single strand cleavage event 5′ to a mutation on a first strand of the HBB target gene, as shown in the diagram below:

[chemical structure]

wherein X₁ is the first single strand cleavage event and M is the mutation in the HBB target gene.

[0070] In one embodiment, the second gRNA molecule is designed to position the second single strand cleavage event 5′ to a mutation on a second strand of the HBB target gene. In one embodiment, the second gRNA molecule is designed to position the second single strand cleavage event 5′ to a mutation on a second strand of the HBB target gene, as shown in the diagram below:

[chemical structure]

wherein X₂ is the second single strand cleavage event and M is the mutation in the HBB target gene.

[0071] In one embodiment, the first gRNA molecule is designed to position the first single strand cleavage event 5′ to a mutation on the first strand of the HBB target gene, and wherein the second gRNA molecule is designed to position the second single strand cleavage event 5′ to the mutation on the second strand of the HBB target gene. In one embodiment, the first gRNA molecule is designed to position the first single strand cleavage event 5′ to a mutation on the first strand of the HBB target gene, and wherein the second gRNA molecule is designed to position the second single strand cleavage event 5′ to the mutation on the second strand of the HBB target gene, as shown in the diagram below:

[chemical structure]

wherein X₁ is first single strand cleavage event, X₂ is the second single strand cleavage event, and M is the mutation in the HBB target gene.

[0072] In one embodiment, the first single strand cleavage event results in a first 5′ overhang, and wherein the second single strand cleavage event results in a second 5′ overhang.

[0073] In one embodiment, the endogenous target gene has at least 80% sequence homology with the endogenous homologous region. In one embodiment, the endogenous target gene has at least 85% sequence homology with the endogenous homologous region. In one embodiment, the endogenous target gene has at least 92% sequence homology with the endogenous homologous region. In one embodiment, the endogenous target gene has at least 95% sequence homology with the endogenous homologous region. In one embodiment, the endogenous target gene has at least 80%, 81%, 82%, 83%, 84%, 85%, 86%, 87%, 88%, 89%, 90%, 91%, 92%, 93%, 94%, 95%, 96%, 97%, 98%, 99%, or 100% sequence homology with the endogenous homologous region.

[0074] In one embodiment, the first eaCas9 molecule is a first nickase molecule and the second eaCas9 molecule is a second nickase molecule. In one embodiment, each nickase molecule forms a single strand break in the target gene. In one embodiment, the first eaCas9 nickase molecule and the second eaCas9 nickase molecule are the same species of nickase molecule.

[0075] In one embodiment, the eaCas9 nickase molecule comprises HNH-like domain cleavage activity but has no N-terminal RuvC-like domain cleavage activity. In one embodiment, the eaCas9 molecule is an HNH-like domain nickase. In one embodiment, the eaCas9 nickase molecule comprises a mutation at an amino acid position corresponding to amino acid position D10 of Streptococcus pyogenes Cas9.

[0076] In one embodiment, the first gRNA molecule is a gRNA molecule comprising a sequence set forth as any one of SEQ ID NOs: 387-485, 6803-6871, or 16010-16256, and the second gRNA molecule is a gRNA molecule comprising a sequence set forth as any one of SEQ ID NOs: 387-485, 6803-6871, or 16010-16256. In one embodiment, the first gRNA molecule is a gRNA molecule comprising a sequence of SEQ ID NO:387, and the second gRNA molecule is a gRNA molecule comprising a sequence of SEQ ID NO:16318.

[0077] In one embodiment, the composition is for use in a medicament. In another embodiment, the composition is for use in the treatment of spinal muscular atrophy. In one embodiment, the composition is for use in the treatment of chronic granulomatous disease. In one embodiment, the composition is for use in the treatment of sickle cell disease. In one embodiment, the composition is for use in the treatment of beta thalassemia.

[0078] In another aspect, disclosed herein is a method of modifying a target region of a target gene in a mammalian cell comprising generating, within the cell, a first single strand break on a first strand of the target gene and second single strand break on a second strand of the target gene, thereby forming a double strand break with a first 5′ overhang and a second 5′ overhang; and wherein the double strand break is repaired by gene conversion, thereby modifying the target region of the target gene in the mammalian cell.

[0079] In one embodiment, the target region of the target gene is located (a) between the first single strand break and the second single strand break, (b) within fewer than 50 nucleotides of the first single strand break, or (c) within fewer than 50 nucleotides of the second single strand break.

[0080] In another aspect, disclosed herein is a method of modifying a target region of a target gene in a mammalian cell comprising generating, within the cell, a first single strand break on a first strand of the target gene and second single strand break on a second strand of the target gene, thereby forming a double strand break with a first 5′ overhang and a second 5′ overhang; wherein the target region of the target gene is located (a) between the first single strand break and the second single strand break, (b) within fewer than 50 nucleotides of the first single strand break, or (c) within fewer than 50 nucleotides of the second single strand break; and wherein the double strand break is repaired by gene conversion, thereby modifying the target region of the target gene in the mammalian cell.

[0081] In one embodiment, the step of forming the first single strand break and the second single strand break comprises contacting the cell with at least one eaCas9 molecule, a first gRNA molecule, and a second gRNA molecule. In one embodiment, the first gRNA molecule and the at least one eaCas9 molecule associate with the target gene and generate the first single strand break, and the second gRNA molecule and the at least one eaCas9 molecule associate with the target gene and generate the second single strand break.

[0082] In one embodiment, the double strand break is repaired by gene conversion using an endogenous homologous region.

[0083] In one embodiment, the target gene is an HBB gene, and wherein the endogenous homologous region is a region of an HBD gene. In one embodiment, the first gRNA molecule comprises a targeting sequence comprising SEQ ID NO:387 and the second gRNA molecule comprises a targeting sequence comprising SEQ ID NO:16318.

[0084] In one embodiment, the at least one eaCas9 molecule is at least one eaCas9 nickase molecule. In one embodiment, the at least one eaCas9 nickase molecule is at least one HNH-type nickase molecule.

[0085] In one embodiment, the endogenous homologous region of the endogenous gene is located within a gene cluster comprising the target gene.

[0086] In another embodiment, disclosed herein is a method of increasing the percentage of cells in a population of cells that modify a target region of a target gene by gene conversion using an endogenous homologous region, the method comprising contacting the population of cells with a first gRNA molecule, a first enzymatically active Cas9 (eaCas9) molecule, a second gRNA molecule, and a second eaCas9 molecule; wherein the first gRNA molecule and the first eaCas9 molecule associate with the target gene and generate a first single strand cleavage event on a first strand of the target gene; wherein the second gRNA molecule and the second eaCas9 molecule associate with the target gene and generate a second single strand cleavage event on a second strand of the target gene, thereby forming a double strand break with a first 5′ overhang and a second 5′ overhang; and wherein the first 5′ overhang and the second 5′ overhang in the target gene are repaired by gene conversion using the endogenous homologous region, thereby increasing the percentage of cells in the population of cells that modify the target region of the target gene by gene conversion using the endogenous homologous region.

[0087] In one embodiment, the first 5′ overhang and the second 5′ overhang in the target gene are repaired by gene conversion in about 12% to about 45%, about 15% to about 30%, or about 15% to about 40% of the cells in the population of cells. In one embodiment, the cells are HEK293 cells. In one embodiment, the cells are K562 cells. In one embodiment, the cells are U2OS cells. In another embodiment, the cells are blood mononuclear cells, e.g., CD3+ T lymphocyte cells.

[0088] In one embodiment, the first 5′ overhang and the second 5′ overhang in the target gene are repaired by gene conversion in about 4% to about 6% of cells in the population of cells, wherein the cells are HSCs, e.g., CD34+ cells.

[0089] In one embodiment, the percentage of cells in the population of cells that modify the target region of the target gene by gene conversion using the endogenous homologous region is increased, as compared to a percentage of cells in a population of cells which would modify the target region of the target gene by gene conversion using the endogenous homologous region in the absence of the contacting.

[0090] In one embodiment, the percentage of cells in the population of cells that modify the target region of the target gene by gene conversion using the endogenous homologous region is increased, as compared to a percentage of cells in a population of cells which would modify the target region of the target gene by gene conversion using the endogenous homologous region after contacting the population of cells with a first gRNA molecule, a first enzymatically active Cas9 (eaCas9) molecule, a second gRNA molecule, and a second eaCas9 molecule which would generate a first 3′ overhang and a second 3′ overhang in the target gene.

[0091] In one embodiment, the percentage of cells in the population of cells that modify the target region of the target gene by gene conversion using the endogenous homologous region is increased, as compared to a percentage of cells in a population of cells which would modify the target region of the target gene by gene conversion using the endogenous homologous region after contacting the population of cells with a first gRNA molecule, a first enzymatically active Cas9 (eaCas9) molecule, a second gRNA molecule, and a second eaCas9 molecule which would generate a double strand blunt end brake in the target gene.

[0092] In one embodiment, the percentage of cells in the population of cells that modify the target region of the target gene by gene conversion using the endogenous homologous region is increased about 10%, 20%, 30%, 40%, 50%, 60%, 70%, 80%, 90%, 100%, two-fold, three-fold, four-fold, or five-fold. In one embodiment, the percentage of cells in the population of cells that modify the target region of the target gene by gene conversion using the endogenous homologous region is increased two-fold. In one embodiment, the percentage of cells in the population of cells that modify the target region of the target gene by gene conversion using the endogenous homologous region is increased three-fold. In one embodiment, the percentage of cells in the population of cells that modify the target region of the target gene by gene conversion using the endogenous homologous region is increased four-fold.

[0093] Headings, including numeric and alphabetical headings and subheadings, are for organization and presentation and are not intended to be limiting.

[0094] Other features and advantages of the invention will be apparent from the detailed description, drawings, and from the claims.

### BRIEF DESCRIPTION OF THE DRAWINGS

[0095] FIG. 1 depicts a scheme of the pair 8/15 of gRNAs surrounding the sickle mutation in combination with a Cas9 nickase (D10A or N863A). The nickases are shown as the grey ovals.

[0096] FIG. 2 depicts the percentages of total editing event after a wild type Cas9 or a Cas9 nickase (D10A or N863A). A repetition of at least three independent experiments for each condition is shown.

[0097] FIG. 3A depicts the frequency of deletions a wild type Cas9 or a Cas9 nickase (D10A or N863A). A representation of at least 3 independent experiments for each condition is shown.

[0098] FIG. 3B depicts the frequency distribution of the length of deletions using a wild type Cas9 and gRNA 8 (similar results have been obtained with gRNA 15).

[0099] FIG. 3C depicts the frequency distribution of the length of deletions using a Cas9 nickase (D10A) with gRNAs 8/15 (similar results have been obtained using Cas9 N863A).

[0100] FIG. 4A depicts the frequency of gene conversion using a wild type Cas9 or a Cas9 nickase (D10A or N863A).

[0101] FIG. 4B shows a scheme representing the region of similarity between the HBB and HBD loci.

[0102] FIG. 5 depicts the frequency of different lengths of HBD sequences that were incorporated into the HBB locus.

[0103] FIG. 6A depicts the frequency of insertions using a wild type Cas9 or a Cas9 nickase (D10A or N863A). A representation of at least three independent experiments for each condition is shown.

[0104] FIG. 6B depicts examples of common reads observed in U2OS cells electroporated with plasmid encoding Cas9 N863 and gRNA pair 8/15. The HBB reference is shown on the top.

[0105] FIG. 7A depicts the overall modification frequency at the HBB locus, separated into deletions, insertions, and gene conversion events. The different repair outcomes after WT (wild type), Cas9 D10 nickase or Cas9 N863A nickase activity in U2OS cells were measured by PCT amplification of individual amplification products. Error bars were derived from 5 independent experiments. Total number of sequences analyzed: n=569 for WT Cas9, n=718 for Cas9 D10A nickase, n=556 for Cas9 N863A nickase

[0106] FIG. 7B depicts the deletion size distribution for WT, Cas9 D10A nickase, or Cas9 N863A nickase. Total number of sequences analyzed: n=258 for WT Cas9, n=241 for Cas9 D10A nickase, n=103 for Cas9 N863A nickase. Individual deletion size data from each Cas9 variant was scored from Sanger sequencing.

[0107] FIG. 8A depicts the overall modification frequency separated into deletions, insertions and gene conversion events for either WT Cas9-(WT), Cas9 D10A nickase-(D10A), or Cas9 N863A nickase-nucleofected (N863A) population of U2OS cells (bulk) or individual single U2OS cell clones. For WT Cas9, 58 sequences were analyzed for populations of cells (bulk) and 92 individual clones were analyzed. For Cas9 D10A nickase, 62 sequences were analyzed for populations of cells (bulk) and 81 individual clones were analyzed. For Cas9 N863A nickase, 73 sequences were analyzed for populations of cells (bulk) and 96 individual clones were analyzed.

[0108] FIG. 8B depicts the overall modification frequency separated into deletions, insertions, and gene conversion events for either WT Cas9-(WT), Cas9 D10A nickase-(D10A), or Cas9 N863A nickase-nucleofected (N863A) K562 cells. Number of sequences analyzed: n=91 for WT Cas9, n=85 for Cas9 D10A nickase, n=131 for Cas9 N863A nickase.

[0109] FIG. 9 graphically depicts the positions of nucleotide mismatches (thin lines) and deletions (thick line) between the HBD and HBB genes and a histogram of the relative gene conversion frequency plotted as a function of the position on the Hbb locus.

[0110] FIG. 10A depicts western blot analyses of the knockdown efficiency of nucleofection of U2OS cells with siRNAs directed against firefly luciferase (FF, control), BRCA2, or RAD51 genes, as well as gel-loading controls. For BRCA2 knockdown, the gel loading control was β-actin. For RAD51 knockdown, the gel loading control was vinculin.

[0111] FIG. 10B depicts the overall modification frequency at the HBB locus separated into deletions, insertions, and gene conversion as determined by Sanger sequencing. U2OS cells nucleofected with siRNA against firefly luciferase (FF, control), BRCA2, or RAD51 genes, in addition to the Cas9 D10A nickase and gRNA pair 8/15. p-values for the differences in gene conversion frequency were calculated using the two-tailed Student's t-test. Four independent experiments were performed. Total number of sequences analyzed: n=476 for FF control siRNA treated cells, n=407 for BRCA2 siRNA treated cells, n=389 for RAD51 siRNA treated cells.

[0112] FIG. 10C depicts the overall modification frequency at the HBB locus resolved for deletions, insertions, and gene conversion as determined by Sanger sequencing. U2OS cells nucleofected with siRNA against firefly luciferase (FF, control), BRCA2, or RAD51 genes, in addition to the Cas9 D10A nickase and gRNA pair 8/15, in the presence of 50 pM of donor template. p-values for the differences in gene conversion frequency were calculated using the two-tailed Student's t-test. Total number of sequence from at least four independent experiments. Total number of sequences analyzed: n=770 for FF control siRNA treated cells, n=652 for BRCA2 siRNA treated cells, n=389 for RAD51 siRNA treated cells.

[0113] FIG. 11A depicts the raw number and percentage of insertions detected in individual cells nucleofected with the Cas9 D10A nickase or Cas9 N863A nickase and gRNA pair 8/15 that were either derived from the overhang, or that contain the full overhang repetition. Overhangs were defined as sequences that had at least a consecutive stretch of 9 nucleotides of the predicted overhang sequence present. P=value was calculated using Fisher's exact test.

[0114] FIG. 11B depicts histogram plots of insertion length for either the Cas9 D10A nickase- or Cas9 N863A nickase-induced lesions. Individual insertion size data from each Cas9 variant was scored from Sanger sequencing data of U2OS cells treated with either Cas9 10A nickase or Cas9 N863A nickase and gRNA pair 8/15. Difference in length between Cas9 D10A nickase- and Cas9 N863A nickase-induced lesions was significant (p=1.274×10⁻¹²; permutation test). Number of insertions plotted: n=75 for Cas9 D10A nickase, and n=325 for Cas9 N863A nickase.

[0115] FIG. 12A depicts histogram plots showing how frequently and the position in the overhang of 4-mers found within insertion sequences aligned to different positions along the overhang sequence in U2OS cells treated with either Cas9 10A nickase or Cas9 N863A nickase and gRNA pair 8/15. Parts of insertion sequences containing the 4-mer sequence could not be uniquely mapped to a single position within the overhang.

[0116] FIG. 12B depicts exemplary insertion sequences of the full overhang resulting from Cas9 D10A nickase or Cas9 N863A nickase-induced lesions. Cas9 D10 nickase-induced insertions did not show overlaps, while Cas9 N863A nickase-induced insertions showed overlaps, indicating microhomology usage. Positioning of each gRNA (gRNA8 or gRNA15) shown as indicated. Position of the PAM indicated in black.

[0117] FIG. 13A is a schematic representation of the donor template.

[0118] FIG. 13B depicts the frequency of HDR using a wild type Cas9 or a Cas9 nickase (D10A or N863A).

[0119] FIG. 13C depicts different forms of donors and their contribution to HDR.

[0120] FIG. 14 depicts the overall modification frequency at the HBB locus separated into repair outcomes (i.e., deletions, insertions, gene conversion, and gene correction) for either WT Cas9-(WT), Cas9 D10A nickase-(D10A), or Cas9 N863A nickase-nucleofected (N863A) U2OS cells in the presence of 50 pM ssODN donor template. Repair outcomes were determined by PCR amplification of the HBB locus, followed by Sanger sequencing of individual amplification products. p-value for the difference in gene correction frequency was calculated using the two-tailed Student's t-test. Total number of sequences plotted from at least three independent experiments: n=200 for WT Cas9, n=448 for Cas9 D10A nickase, and n=422 for Cas9 N863A nickase.

[0121] FIG. 15 depicts the distribution of the editing events on the presence of wild type Cas9 with gRNA 8, gRNA 15 and with the Cas9 nickase (D10A) with gRNA 8/15 pair.

[0122] FIG. 16A depicts the overall modification frequency of U2OS cells nucleofected with either WT Cas9, Cas9 D10 nickase, or Cas9 N863A nickase and gRNA8. Sequencing was performed using Illumina MiSeq and modifications were quantified computationally using CRISPResso.

[0123] FIG. 16B depicts a 15% urea polyacrylamide gel electrophoresis displaying the cutting efficiency of various amounts of Cas9 D10A nickase and gRNA8 or Cas9 N863A nickase and gRNA8 complexes with double stranded DNA. Cleavage products are indicated.

[0124] FIG. 17A depicts the frequency of deletions, insertions, gene conversion, and gene correction observed in U2OS cells nucleofected with either WT Cas9, Cas9 D10A nickase, or Cas9 N863A nickase, gRNA8, donor template and siRNAs against firefly luciferase (FF, control), BRCA2, or RAD51. Sequencing was performed using MiSeq and modifications were scored by computationally using CRISPResso.

[0125] FIG. 18A depicts a bar graph of fold change in the rates of total editing events and gene correction for U2OS cells nucleofected with either WT Cas9, Cas9 D10A nickase, or Cas9 N863A nickase, gRNA8, donor template and siRNAs against RAD51.

[0126] FIG. 18B depicts histograms of the length of deletions induced in U2OS cells nucleofected with either WT Cas9, or Cas9 D10A nickase, gRNA8, donor template and siRNAs against firefly luciferase (FF, control) or RAD51.

[0127] FIG. 18C depicts a model of the possible role of HR in the processing of nicks that escaped single strand break repair in the presence or absence of RAD51.

[0128] FIG. 19 depicts genome editing of the HBB locus in bone marrow leukemia K562 hematopoietic cells after electroporation of Cas9 protein complexed to HBB gRNAs 8 and 15 (RNP) or Cas9 mRNA co-delivered with HBB gRNAs 8 and 15 (RNA). “gRNA 8” has the targeting domain sequence GUAACGGCAGACUUCUCCUC (SEQ ID NO: 388) and “gRNA 15” has the targeting domain sequence AAGGUGAACGUGGAUGAAGU (SEQ ID NO: 387).

[0129] FIG. 20 is a schematic of the HBB locus indicating the position of the different gRNA molecules used in the study.

[0130] FIG. 21 depicts the overall editing frequencies for the Cas9 D10A and Cas9 N863A nickases in terms of overhang length and composition.

[0131] FIG. 22 depicts the insertion frequencies for the Cas9 D10A and Cas9 N863A nickases in terms of overhang length and composition.

[0132] FIG. 23 depicts the percentages of insertions derived from the overhang sequence for the Cas9 D10A (left bars) and Cas9 N863 (right bars) nickases.

[0133] FIG. 24 depicts the lengths of insertions for the Cas9 D10A (left bars) and Cas9 N863 (right bars) nickases.

[0134] FIG. 25 depicts the effect of overhang length and composition on gene conversion induced by the Cas9 D10A and Cas9 N863 nickases.

[0135] FIG. 26 depicts the effect of overhang length and composition on gene correction induced by the Cas9 D10A and Cas9 N863A nickases.

[0136] FIGS. 27A and 27B depict an analysis of stability of D10A RNP in vitro and ex vivo in adult CD34+ HSCs. FIG. 27A depicts Differential Scanning Fluorimetry Shift Assay after complexing D10A protein with the indicated HBB gRNAs added at 1:1 molar ratio gRNA:RNP. FIG. 27B depicts detection of Cas9 protein in cell lysates 72 hours after HSCs were electroporated with D10A RNP or D10A mRNA with gRNAs HBB-8 and HBB-15. The electroporation program (P2 or P3) used is indicated at the top of the image. 2×gRNA: 10 μg each gRNA was co-delivered with D10A mRNA (vs. 5 μg of each gRNA).

[0137] FIGS. 28A, 28B, and 28C depict adult CD34+ HSCs maintain stem cell phenotype after electroporation with D10A nickase RNP and HBB targeting gRNA pair. FIG. 28A depicts gene edited adult CD34+ cells maintain expression of stem cell markers CD34 and CD133 at 72 hours after electroporation. FIG. 28B depicts absolute live (7-AAD-AnnexinV⁻) CD34+ cell number at indicated time points relative to electroporation of D10A RNP HBB gRNA pair. FIG. 28C depicts gene edited adult CD34+ cells maintain hematopoietic colony forming cell (CFC) activity and multipotency. E: erythroid, G: granulocyte, M: macrophage, GM: granulocyte-macrophage, GEMM: granulocyte-erythrocyte-macrophage-monocyte CFCs.

[0138] FIGS. 29A, 29B, and 29C depict D10A nickase RNP co-delivered with HBB targeted gRNA pair supports gene editing and HDR in adult CD34⁺ HSCs. FIG. 29A depicts percentage of gene editing events as detected by T7E1 endonuclease assay analysis. FIG. 29B depicts DNA sequence analysis of the HBB locus. The subtypes of gene editing events (insertions, deletions, indels, and gene conversion events) are indicated. RNP* refers to use of electroporation program 3. FIG. 29C depicts percentages of types of editing events detected in the gDNA from the cells electroporated with the conditions shown in FIG. 29B. Data are shown as a percentage of all gene editing events.

[0139] FIG. 30 depicts flow cytometry analysis of β-hemoglobin expression in the erythroid progeny differentiated from D10A nickase RNP gene-edited adult CD34⁺ HSCs. CFU-E colonies (far left) differentiated from D10A RNP HBB gRNA electroporated CD34⁺ cells were dissociated, fixed, permeabilized, and stained for β-hemoglobin expression. The gene editing frequencies detect in the parental CD34+ cell population are indicated above the histograms for the indicated samples. The percentage of β-hemoglobin expression in each colony was determined by flow cytometry and is indicated at the top right of each histogram.

[0140] FIGS. 31A and 31B depict that cord blood CD34⁺ HSCs maintained stem cell phenotype after electroporation with D10A nickase RNP and HBB targeting gRNA pair. FIG. 31A depicts gene edited CB CD34⁺ cells maintain viability after electroporation. Right: Absolute live (7-AAD⁻AnnexinV⁻) CD34⁺ cell number at indicated time points relative to electroporation of D10A RNP HBB gRNA pair. FIG. 31B depicts that gene edited CB CD34⁺ cells maintained hematopoietic colony forming cell (CFC) activity and multipotency. E: erythroid, G: granulocyte, M: macrophage, GM: granulocyte-macrophage, GEMM: granulocyte-erythrocyte-macrophage-monocyte CFCs. The amounts of D10A RNP delivered per million cells (5 or 10 μg) and the 2-hour recovery temperature (parentheses) after electroporation of the parental CB CD34⁺ cells are indicated.

[0141] FIGS. 32A, 32B, and 32C depict D10A RNP co-delivered with HBB targeted gRNA pair supported gene editing and HDR in CB CD34⁺ HSCs. FIG. 32A depicts percentage of gene editing events as detected by T7E1 endonuclease assay analysis. FIG. 32B depicts DNA sequence analysis of the HBB locus. The subtypes of gene editing events (insertions, deletions, indels, and gene conversion events) are indicated as a fraction of the total sequencing reads. FIG. 32C depicts subtypes of gene editing events expressed as relative percentage to the total number gene editing events detected. The amounts of D10A RNP delivered per million cells (5 or 10 μg) and the 2-hour recovery temperature (parentheses) after electroporation of the parental CB CD34⁺ cells are indicated.

[0142] FIGS. 33A, 33B, and 33C depict directed differentiation of gene-edited CB CD34⁺ HSCs into erythroblasts. Flow cytometry analysis of day 18 erythroblasts differentiated from gene edited CB CD34⁺ cells. FIG. 33A depicts CD71 (transferrin receptor and CD235 (Glycophorin A). FIG. 33B depicts fetal hemoglobin (g-hemoglobin). FIG. 33C depicts loss of CD45 and dsDNA through enucleation as indicated by the absence of dsDNA (negative for dsDNA binding dye DRAQ5). Note that, unlike adult CD34⁺ cells, CB CD34⁺ cells differentiated into fetal-like erythroblasts that express fetal g-hemoglobin (not adult b-hemoglobin).

[0143] FIGS. 34A and 34B depict cord blood CD34⁺ HSCs maintained stem cell phenotype after electroporation with Cas9 variant RNPs and HBB targeting gRNA pair. FIG. 34A depicts gene edited CB CD34⁺ cells maintain viability after electroporation with WT Cas9 endotoxin-free (EF WT) Cas9, N863A nickase, or D10A nickase co-delivered with HBB gRNA pair. Absolute live (7-AAD⁻AnnexinV⁻) CD34⁺ cell number at indicated time points relative to electroporation. FIG. 34B depicts gene edited CB CD34⁺ cells maintained hematopoietic colony forming cell (CFC) activity and multipotency. E: erythroid, G: granulocyte, M: macrophage, GM: granulocyte-macrophage, GEMM: granulocyte-erythrocyte-macrophage-monocyte CFCs. The amounts of RNP delivered per million cells (10 μg) and the 2-hour recovery temperature (parentheses) after electroporation of the parental CB CD34⁺ cells are indicated.

[0144] FIGS. 35A and 35B depict comparison of gene editing at the HBB locus in CB CD34⁺ cells mediated by WT and nickase Cas9 variant RNPs. FIG. 35A depicts T7E1 analysis of the percentage of indels detected 72 hours after electroporation at the targeted site in the HBB locus after electroporation of WT Cas9, Endotoxin-free WT Cas9 (EF-WT), N863A nickase, and D10A nickase RNPs, each co-delivered with HBB-8 and HBB-15 gRNA pair. FIG. 35B depicts Western blot analysis showing detection of Cas9 variants in cell lysates of CB CD34⁺ cells at the indicated time points after electroporation. The amounts of RNP delivered per million cells (10 μg) and the 2-hour recovery temperature (parentheses) after electroporation of the parental CB CD34⁺ cells are indicated.

[0145] FIGS. 36A and 36B depict comparison of HDR and NHEJ events detected at the HBB locus after gene editing with WT Cas9 and D10A nickase in CB CD34⁺ HSCs. FIG. 36A depicts percentage of gene editing events (72 hours after electroporation) detected by DNA sequencing analysis and shown as a percentage of the total sequence reads. Cells received RNP (WT Cas9, Endotoxin-free WT Cas9 [EF-WT], N863A and D10A nickases) with HBB-8 and HBB-15 gRNA pair. FIG. 36B depicts percentages of types of editing events detected in the gDNA from the cells electroporated with the conditions shown in FIG. 36A. Data are shown as a percentage of all gene editing events.

[0146] FIG. 37 depicts that down-regulation of Pol Theta in the context of the D10A Cas9 does not affect the gene editing profile. In contrast, Pol Theta down-regulation in the context of a mutant Cas9 (such as the N863A Cas9 nuclease) leads to a strong reduction of the insertion frequency and an increase in the gene conversion rate. Cells were treated with either a control siRNA or an siRNA directed against Pol Theta. The N863A enzyme is directed to make two nicks at the target site resulting in a 3′ overhang. In the absence of Pol Theta, the rates of insertion are reduced and gene conversion is increased because the Alt-NHEJ pathway (Pol Theta Dependant) has been downregulated.

[0147] FIG. 38 depicts that the gene conversion frequency is highly impaired in the absence of BRCA2 and RAD51. D10A induced gene conversion is dependent on BRCA2 and RAD51. Cells were treated with siRNA against a negative control, BRCA2, and RAD51 in conjunction with D10A and gRNA 8 and 15.

[0148] FIG. 39 depicts a model of the genetic requirements of the gene conversion pathway in the context of different Cas9 nucleases (wild type, D10A or N863A) using BRCA2 and RAD51.

[0149] FIGS. 40A, 40B and 40C depict that Cas9 D10A nickase RNP co-delivered with a HBB targeted gRNA pair supported gene editing in T lymphocytes expanded from peripheral blood mononuclear cells (MNCs) from a sickle cell disease (SCD) patient. FIG. 40A depicts the expansion/activation of the T lymphocyte fraction from bulk MNCs from a SCD patient using CD3/CD28 immunomagnetic beads at day 3 (left panel) and day 7 (right panel) after activation. FIG. 40B depicts the total viability of expanded T lymphocytes electroporated with Cas9 D10A nickase complexed with a HBB targeted gRNA pair (HBB-8-sickle and HBB-15), and co-electroporated with a single stranded oligonucleotide donor, following reactivation CD3/CD28 immunomagnetic beads, no beads control (i.e., no exposure CD3/CD28 immunomagnetic beads) or negative control. FIG. 40C depicts gene editing frequency at the HBB locus of expanded T lymphocytes electroporated with Cas9 D10A nickase complexed with a HBB targeted gRNA pair (HBB-8-sickle and HBB-15), and co-electroporated with a single stranded oligonucleotide donor, following reactivation CD3/CD28 immunomagnetic beads, no beads control (i.e., no exposure CD3/CD28 immunomagnetic beads) or negative control.

### DETAILED DESCRIPTION

[0150] In order that the invention is understood, certain terms are herein defined.

### DEFINITIONS

[0151] “Alt-HDR” or “alternative HDR,” or alternative homology-directed repair, as used herein, refers to the process of repairing DNA damage using a homologous nucleic acid (e.g., an endogenous homologous sequence, e.g., a sister chromatid, or an exogenous nucleic acid, e.g., a template nucleic acid). Alt-HDR is distinct from canonical HDR in that the process utilizes different pathways from canonical HDR, and can be inhibited by the canonical HDR mediators, RAD51 and BRCA2. Also, alt-HDR uses a single-stranded or nicked homologous nucleic acid for repair of the break.

[0152] “ALT-NHEJ” or “alternative NHEJ”, or alternative non-homologous end joining, as used herein, is a type of alternative end joining repair process, and utilizes a different pathway than that of canonical NHEJ. In alternative NHEJ, a small degree of resection occurs at the break ends on both sides of the break to reveal single-stranded overhangs. Ligation or annealing of the overhangs results in the deletion of sequence. ALT-NHEJ is a category that includes microhomology-mediated end joining (MMEJ), blunt end joining (EJ), and synthesis-dependent microhomology-mediated end joining (SD-MMEJ). In MMEJ, microhomologies, or short spans of homologous sequences, e.g., 5 nucleotides or more, on the single-strand are aligned to guide repair, and leads to the deletion of sequence between the microhomologies.

[0153] “Amino acids” as used herein encompasses the canonical amino acids as well as analogs thereof. “Canonical HDR,” or canonical homology-directed repair, as used herein, refers to the process of repairing DNA damage using a homologous nucleic acid (e.g., an endogenous homologous sequence, e.g., a sister chromatid, or an exogenous nucleic acid, e.g., a template nucleic acid). Canonical HDR typically acts when there has been significant resection at the double-strand break, forming at least one single stranded portion of DNA. In a normal cell, HDR typically involves a series of steps such as recognition of the break, stabilization of the break, resection, stabilization of single stranded DNA, formation of a DNA crossover intermediate, resolution of the crossover intermediate, and ligation. The process requires RAD51 and BRCA2, and the homologous nucleic acid is typically double-stranded.

[0154] “Canonical NHEJ”, or canonical non-homologous end joining, as used herein, refers to the process of repairing double-strand breaks in which the break ends are directly ligated. This process does not require a homologous nucleic acid to guide the repair, and can result in deletion or insertion of one or more nucleotides. This process requires the Ku heterodimer (Ku70/Ku80), the catalytic subunit of DNA-PK (DN-PKcs), and/or DNA ligase XRCC4/LIG4. Unless indicated otherwise, the term “HDR” as used herein encompasses canonical HDR and alt-HDR.

[0155] A “Cas9 molecule,” as used herein, refers to a Cas9 polypeptide or a nucleic acid encoding a Cas9 polypeptide. A “Cas9 polypeptide” is a polypeptide that can interact with a gRNA molecule and, in concert with the gRNA molecule, localize to a site comprising a target domain and, in certain embodiments, a PAM sequence. Cas9 molecules include both naturally occurring Cas9 molecules and Cas9 molecules and engineered, altered, or modified Cas9 molecules or Cas9 polypeptides that differ, e.g., by at least one amino acid residue, from a reference sequence, e.g., the most similar naturally occurring Cas9 molecule. (The terms altered, engineered or modified, as used in this context, refer merely to a difference from a reference or naturally occurring sequence, and impose no specific process or origin limitations.) A Cas9 molecule may be a Cas9 polypeptide or a nucleic acid encoding a Cas9 polypeptide. A Cas9 molecule may be a nuclease (an enzyme that cleaves both strands of a double-stranded nucleic acid), a nickase (an enzyme that cleaves one strand of a double-stranded nucleic acid), or an enzymatically inactive (or dead) Cas9 molecule. A Cas9 molecule having nuclease or nickase activity is referred to as an “enzymatically active Cas9 molecule” (an “eaCas9” molecule). A Cas9 molecule lacking the ability to cleave target nucleic acid is referred to as an “enzymatically inactive Cas9 molecule” (an “eiCas9” molecule).

[0156] In certain embodiments, a Cas9 molecule meets one or both of the following criteria: it has at least 20, 30, 40, 50, 55, 60, 65, 70, 75, 80, 81, 82, 83, 84, 85, 86, 87, 88, 89, 90, 91, 92, 93, 94, 95, 96, 97, 98, 99, or 100% homology with, or it differs by no more than 1, 2, 3, 4, 5, 6, 7, 8, 9, 10, 11, 12, 13, 14, 15, 16, 17, 18, 19, 20, 25, 30, 35, 40, 35, 50, 55, 60, 65, 70, 75, 80, 85, 90, 95, 100, 150, 200, 250, 300, 350 or 400, amino acid residues from, the amino acid sequence of a reference sequences, e.g., naturally occurring Cas9 molecule.

[0157] In certain embodiments, a Cas9 molecule meets one or both of the following criteria: it has at least 20, 30, 40, 50, 55, 60, 65, 70, 75, 80, 81, 82, 83, 84, 85, 86, 87, 88, 89, 90, 91, 92, 93, 94, 95, 96, 97, 98, 99, or 100% homology with, or it differs by no more than 1, 2, 3, 4, 5, 6, 7, 8, 9, 10, 11, 12, 13, 14, 15, 16, 17, 18, 19, 20, 25, 30, 35, 40, 35, 50, 55, 60, 65, 70, 75, 80, 85, 90, 95, 100, 150, 200, 250, 300, 350 or 400, amino acid residues from, the amino acid sequence of a reference sequences, e.g., naturally-occurring Cas9 molecule.

[0158] In certain embodiments, each domain of the Cas9 molecule (e.g., the domains named herein) will, independently have: at least 20, 30, 40, 50, 55, 60, 65, 70, 75, 80, 81, 82, 83, 84, 85, 86, 87, 88, 89, 90, 91, 92, 93, 94, 95, 96, 97, 98, 99, or 100% homology with such a domain described herein. In certain embodiments at least 1, 2, 3, 4, 5, of 6 domains will have, independently, at least 50, 60, 70, 80, 81, 82, 83, 84, 85, 86, 87, 88, 89, 90, 91, 92, 93, 94, 95, 96, 97, 98, 99, or 100% homology with a corresponding domain, while any remaining domains will be absent, or have less homology to their corresponding naturally occurring domains.

[0159] In certain embodiments, the Cas9 molecule is a S. pyogenes Cas9 variant. In certain embodiments, the Cas9 variant is the EQR variant. In certain embodiments, the Cas9 variant is the VRER variant. In certain embodiments, the eiCas9 molecule is a S. pyogenes Cas9 variant. In certain embodiments, the Cas9 variant is the EQR variant. In certain embodiments, the Cas9 variant is the VRER variant. In certain embodiments, a Cas9 system comprises a Cas9 molecule, e.g., a Cas9 molecule described herein, e.g., the Cas9 EQR variant or the Cas9 VRER variant.

[0160] In certain embodiments, the Cas9 molecule is a S. aureus Cas9 variant. In certain embodiments, the Cas9 variant is the KKH (E782K/N968K/R1015H) variant (see, e.g., Kleinstiver 2015, the entire contents of which are expressly incorporated herein by reference). In certain embodiments, the Cas9 variant is the E782K/K929R/R1015H variant (see, e.g., Kleinstiver 2015). In certain embodiments, the Cas9 variant is the E782K/K929R/N968K/R1015H variant (see, e.g., Kleinstiver 2015). In certain embodiments the Cas9 variant comprises one or more mutations in one of the following residues: E782, K929, N968, R1015. In certain embodiments the Cas9 variant comprises one or more of the following mutations: E782K, K929R, N968K, R1015H and R1015Q (see, e.g., Kleinstiver 2015). In certain embodiments, a Cas9 system comprises a Cas9 molecule, e.g., a Cas9 molecule described herein, e.g., the Cas9 KKH variant.

[0161] As used herein, the term “Cas9 system” refers to a system capable of altering a target nucleic acid by one of many DNA repair pathways. In certain embodiments, the Cas9 system described herein promotes repair of a target nucleic acid via an HDR pathway. In some embodiments, a Cas9 system comprises a gRNA and a Cas9 molecule. In some embodiments, a Cas9 system further comprises a second gRNA. In yet another embodiment, a Cas9 system comprises a gRNA, a Cas9 molecule, and a second gRNA. In some embodiments, a Cas9 system comprises a gRNA, two Cas9 molecules, and a second gRNA. In some embodiments, a Cas9 system comprises a first gRNA, a second gRNA, a first Cas9 molecule, and a second Cas9 molecule. In some embodiments, a Cas9 system further comprises a template nucleic acid.

[0162] As used herein, the term “cleavage event” refers to a break in a nucleic acid molecule. A cleavage event may be a single-strand cleavage event, or a double-strand cleavage event. A single-strand cleavage event may result in a 5′ overhang or a 3′ overhang. A double-stranded cleavage event may result in blunt ends, two 5′ overhangs, or two 3′ overhangs.

[0163] A disorder “caused by” a mutation, as used herein, refers to a disorder that is made more likely or severe by the presence of the mutation, compared to a subject that does not have the mutation. The mutation need not be the only cause of a disorder, i.e., the disorder can still be caused by the mutation even if other causes, such as environmental factors or lifestyle factors, contribute causally to the disorder. In embodiments, the disorder is caused by the mutation if the mutation is a medically recognized risk factor for developing the disorder, and/or if a study has found that the mutation contributes causally to development of the disorder.

[0164] “Derived from”, as used herein, refers to the source or origin of a molecular entity, e.g., a nucleic acid or protein. The source of a molecular entity may be naturally-occurring, recombinant, unpurified, or a purified molecular entity. For example, a polypeptide that is derived from a second polypeptide comprises an amino acid sequence that is identical or substantially similar, e.g., is more than 50% homologous to, the amino acid sequence of the second protein. The derived molecular entity, e.g., a nucleic acid or protein, can comprise one or more modifications, e.g., one or more amino acid or nucleotide changes.

[0165] “Domain,” as used herein, is used to describe a segment of, or a portion of a protein or nucleic acid. Unless otherwise indicated, a domain is not required to have any specific functional property.

[0166] Calculations of homology or sequence identity between two sequences (the terms are used interchangeably herein) are performed as follows. The sequences are aligned for optimal comparison purposes (e.g., gaps can be introduced in one or both of a first and a second amino acid or nucleic acid sequence for optimal alignment and non-homologous sequences can be disregarded for comparison purposes). The optimal alignment is determined as the best score using the GAP program in the GCG software package with a Blossum 62 scoring matrix with a gap penalty of 12, a gap extend penalty of 4, and a frame shift gap penalty of 5. The amino acid residues or nucleotides at corresponding amino acid positions or nucleotide positions are then compared. When a position in the first sequence is occupied by the same amino acid residue or nucleotide as the corresponding position in the second sequence, then the molecules are identical at that position. The percent identity between the two sequences is a function of the number of identical positions shared by the sequences.

[0167] As used herein, the term “endogenous” gene, “endogenous” nucleic acid, or “endogenous” homologous region refers to a native gene, nucleic acid, or region of a gene, which is in its natural location in the genome, e.g., chromosome or plasmid, of a cell. In contrast, the term “exogenous” gene or “exogenous” nucleic acid refers to a gene, nucleic acid, or region of a gene which is not native within a cell, but which is introduced into the cell during the methods of the invention. An exogenous gene or exogenous nucleic acid may be homologous to, or identical to, an endogenous gene or an endogenous nucleic acid.

[0168] As used herein, the term “endogenous homologous region” refers to an endogenous template nucleic acid sequence which is homologous to at least a portion of a target gene, and which can be used in conjunction with a Cas9 molecule and a gRNA molecule to modify, e.g., correct, a sequence of the target gene. In one embodiment, the endogenous homologous region is DNA. In another embodiment, the endogenous homologous region is double stranded DNA. In another embodiment, the endogenous homologous region is single stranded DNA. In one embodiment, the endogenous homologous region is at least 70%, 75%, 80%, 81%, 82%, 83%, 84%, 85%, 86%, 875, 885, 89%, 90%, 91%, 92%, 93%, 94%, 95%, 96%, 9%, 98%, or 99% homologous to at least a portion of the target gene.

[0169] As used herein, “error-prone” repair refers to a DNA repair process that has a higher tendency to introduce mutations into the site being repaired. For instance, alt-NHEJ and SSA are error-prone pathways; C-NHEJ is also error prone because it sometimes leads to the creation of a small degree of alteration of the site (even though in some instances C-NHEJ results in error-free repair); and HR, alt-HR, and SSA in the case of a single-strand oligo donor are not error-prone.

[0170] As used herein, the term “gRNA molecule” or “gRNA” refers to a guide RNA which is capable of targeting a Cas9 molecule to a target nucleic acid. In one embodiment, the term “gRNA molecule” refers to a guide ribonucleic acid. In another embodiment, the term “gRNA molecule” refers to a nucleic acid encoding a gRNA. In one embodiment, a gRNA molecule is non-naturally occurring. In one embodiment, a gRNA molecule is a synthetic gRNA molecule.

[0171] “Governing gRNA molecule,” as used herein, refers to a gRNA molecule that comprises a targeting domain that is complementary to a target domain on a nucleic acid that comprises a sequence that encodes a component of the CRISPR/Cas system that is introduced into a cell or subject. A governing gRNA does not target an endogenous cell or subject sequence. In an embodiment, a governing gRNA molecule comprises a targeting domain that is complementary with a target sequence on: (a) a nucleic acid that encodes a Cas9 molecule; (b) a nucleic acid that encodes a gRNA molecule which comprises a targeting domain that targets the HBB gene (a target gene gRNA); or on more than one nucleic acid that encodes a CRISPR/Cas component, e.g., both (a) and (b). In an embodiment, a nucleic acid molecule that encodes a CRISPR/Cas component, e.g., that encodes a Cas9 molecule or a target gene gRNA molecule, comprises more than one target domain that is complementary with a governing gRNA targeting domain. While not wishing to be bound by theory, it is believed that a governing gRNA molecule complexes with a Cas9 molecule and results in Cas9 mediated inactivation of the targeted nucleic acid, e.g., by cleavage or by binding to the nucleic acid, and results in cessation or reduction of the production of a CRISPR/Cas system component. In an embodiment, the Cas9 molecule forms two complexes: a complex comprising a Cas9 molecule with a target gene gRNA molecule, which complex will alter the HBB gene; and a complex comprising a Cas9 molecule with a governing gRNA molecule, which complex will act to prevent further production of a CRISPR/Cas system component, e.g., a Cas9 molecule or a target gene gRNA molecule. In an embodiment, a governing gRNA molecule/Cas9 molecule complex binds to or promotes cleavage of a control region sequence, e.g., a promoter, operably linked to a sequence that encodes a Cas9 molecule, a sequence that encodes a transcribed region, an exon, or an intron, for the Cas9 molecule. In an embodiment, a governing gRNA molecule/Cas9 molecule complex binds to or promotes cleavage of a control region sequence, e.g., a promoter, operably linked to a gRNA molecule, or a sequence that encodes the gRNA molecule. In an embodiment, the governing gRNA molecule, e.g., a Cas9-targeting governing gRNA molecule, or a target gene gRNA-targeting governing gRNA molecule, limits the effect of the Cas9 molecule/target gene gRNA molecule complex-mediated gene targeting. In an embodiment, a governing gRNA places temporal, level of expression, or other limits, on activity of the Cas9 molecule/target gene gRNA molecule complex. In an embodiment, a governing gRNA reduces off-target or other unwanted activity. In an embodiment, a governing gRNA molecule inhibits, e.g., entirely or substantially entirely inhibits, the production of a component of the Cas9 system and thereby limits, or governs, its activity.

[0172] “HDR”, or homology-directed repair, as used herein, refers to the process of repairing DNA damage using a homologous nucleic acid (e.g., an endogenous nucleic acid, e.g., a sister chromatid, or an exogenous nucleic acid, e.g., a template nucleic acid). HDR typically occurs when there has been significant resection at a double-strand break, forming at least one single stranded portion of DNA. HDR is a category that includes, for example, single-strand annealing (SSA), homologous recombination (HR), single strand template repair (SST-R), and a third, not yet fully characterized alternative homologous recombination (alt-HR) DNA repair pathway. In some embodiments, HDR includes gene conversion and gene correction. In some embodiments, the term HDR does not encompass canonical NHEJ (C-NHEJ). In some embodiments, the term HDR does not encompass alternative non-homologous end joining (Alt-NHEJ) (e.g., blunt end-joining (blunt EJ), (micro homology mediated end joining (MMEJ), and synthesis dependent microhomology-mediated end joining (SD-MMEJ)).

[0173] The terms “homology” or “identity,” as used interchangeably herein, refer to sequence identity between two amino acid sequences or two nucleic acid sequences, with identity being a more strict comparison. The phrases “percent identity or homology” and “% identity or homology” refer to the percentage of sequence identity found in a comparison of two or more amino acid sequences or nucleic acid sequences. Two or more sequences can be anywhere from 0-100% identical, or any value there between. Identity can be determined by comparing a position in each sequence that can be aligned for purposes of comparison to a reference sequence. When a position in the compared sequence is occupied by the same nucleotide base or amino acid, then the molecules are identical at that position. A degree of identity of amino acid sequences is a function of the number of identical amino acids at positions shared by the amino acid sequences. A degree of identity between nucleic acid sequences is a function of the number of identical or matching nucleotides at positions shared by the nucleic acid sequences. A degree of homology of amino acid sequences is a function of the number of amino acids at positions shared by the polypeptide sequences.

[0174] Calculations of homology or sequence identity between two sequences (the terms are used interchangeably herein) are performed as follows. The sequences are aligned for optimal comparison purposes (e.g., gaps can be introduced in one or both of a first and a second amino acid or nucleic acid sequence for optimal alignment and non-homologous sequences can be disregarded for comparison purposes). The optimal alignment is determined as the best score using the GAP program in the GCG software package with a Blossum 62 scoring matrix with a gap penalty of 12, a gap extend penalty of 4, and a frame shift gap penalty of 5. The amino acid residues or nucleotides at corresponding amino acid positions or nucleotide positions are then compared. When a position in the first sequence is occupied by the same amino acid residue or nucleotide as the corresponding position in the second sequence, then the molecules are identical at that position. The percent identity between the two sequences is a function of the number of identical positions shared by the sequences.

[0175] “Gene conversion”, as used herein, refers to the process of repairing DNA damage by homology directed recombination (HDR) using an endogenous nucleic acid, e.g., a sister chromatid or a plasmid, as a template nucleic acid. Without being bound by theory, in some embodiments, BRCA1, BRCA2 and/or RAD51 are believed to be involved in gene conversion. In some embodiments, the endogenous nucleic acid is a nucleic acid sequence having homology, e.g., significant homology, with a fragment of DNA proximal to the site of the DNA lesion or mutation. In some embodiments, the template is not an exogenous nucleic acid.

[0176] “Gene correction”, as used herein, refers to the process of repairing DNA damage by homology directed recombination using an exogenous nucleic acid, e.g., a donor template nucleic acid. In some embodiments, the exogenous nucleic acid is single-stranded. In some embodiments, the exogenous nucleic acid is double-stranded.

[0177] “Homologous recombination” or “HR” refers to a type of HDR DNA-repair which typically acts occurs when there has been significant resection at the double-strand break, forming at least one single stranded portion of DNA. In a normal cell, HR typically involves a series of steps such as recognition of the break, stabilization of the break, resection, stabilization of single stranded DNA, formation of a DNA crossover intermediate, resolution of the crossover intermediate, and ligation. The process requires RAD51 and BRCA2, and the homologous nucleic acid is typically double-stranded. In some embodiments, homologous recombination includes gene conversion.

[0178] “Modulator,” as used herein, refers to an entity, e.g., a compound, that can alter the activity (e.g., enzymatic activity, transcriptional activity, or translational activity), amount, distribution, or structure of a subject molecule or genetic sequence. In an embodiment, modulation comprises cleavage, e.g., breaking of a covalent or non-covalent bond, or the forming of a covalent or non-covalent bond, e.g., the attachment of a moiety, to the subject molecule. In an embodiment, a modulator alters the, three dimensional, secondary, tertiary, or quaternary structure, of a subject molecule. A modulator can increase, decrease, initiate, or eliminate a subject activity.

[0179] As used herein, the term “mutation” refers to a change in the sequence of a nucleic acid as compared to a wild-type sequence of the nucleic acid, resulting a variant form of the nucleic acid. A mutation in a nucleic acid may be caused by the alteration of a single base pair in the nucleic acid, or the insertion, deletion, or rearrangement of larger sections of the nucleic acid. A mutation in a gene may result in variants of the protein encoded by the gene which are associated with genetic disorders. For example, a mutation (e.g., GAG→GTG) results in the substitution of valine for glutamic acid at amino acid position 6 in exon 1 of the HBB gene. This mutation in the HBB gene is associated with beta thalassemia and sickle cell disease.

[0180] “Non-homologous end joining” or “NHEJ,” as used herein, refers to ligation mediated repair and/or non-template mediated repair including canonical NHEJ (cNHEJ), alternative NHEJ (altNHEJ), microhomology-mediated end joining (MMEJ), single-strand annealing (SSA), and synthesis-dependent microhomology-mediated end joining (SD-MMEJ). Unless indicate otherwise, “NHEJ” as used herein encompasses canonical NHEJ, alt-NHEJ, MMEJ, SSA and SD-MMEJ.

[0181] “Polypeptide,” as used herein, refers to a polymer of amino acids.

[0182] As used herein, the term “processing,” with respect to overhangs, refers to either the endonucleolytic processing or the exonucleolytic processing of a break in a nucleic acid molecule. In one embodiment, processing of a 5′ overhang in a nucleic acid molecule may result in a 3′ overhang. In another embodiment, processing of a 3′ overhang in a nucleic acid molecule may result in a 5′ overhang.

[0183] A “reference molecule,” as used herein, refers to a molecule to which a modified or candidate molecule is compared. For example, a reference Cas9 molecule refers to a Cas9 molecule to which a modified or candidate Cas9 molecule is compared. The modified or candidate molecule may me compared to the reference molecule on the basis of sequence (e.g., the modified or candidate may have X % sequence identity or homology with the reference molecule) or activity (e.g., the modified or candidate molecule may have X % of the activity of the reference molecule). For example, where the reference molecule is a Cas9 molecule, a modified or candidate may be characterized as having no more than 10% of the nuclease activity of the reference Cas9 molecule. Examples of reference Cas9 molecules include naturally occurring unmodified Cas9 molecules, e.g., a naturally occurring Cas9 molecule from S. pyogenes, S. aureus, S. thermophilus or N. meningitidis. In certain embodiments, the reference Cas9 molecule is the naturally occurring Cas9 molecule having the closest sequence identity or homology with the modified or candidate Cas9 molecule to which it is being compared. In certain embodiments, the reference Cas9 molecule is a parental molecule having a naturally occurring or known sequence on which a mutation has been made to arrive at the modified or candidate Cas9 molecule.

[0184] “Replacement,” or “replaced,” as used herein with reference to a modification of a molecule does not require a process limitation but merely indicates that the replacement entity is present.

[0185] “Resection”, as used herein, refers to exonuclease-mediated digestion of one strand of a double-stranded DNA molecule, which results in a single-stranded overhang. Resection may occur, e.g., on one or both sides of a double-stranded break. Resection can be measured by, for instance, extracting genomic DNA, digesting it with an enzyme that selectively degrades dsDNA, and performing quantitative PCR using primers spanning the DSB site, e.g., as described herein.

[0186] “SSA” or “Single-strand Annealing”, as used herein, refers to the process where RAD52 as opposed to RAD51 in the HR pathways, binds to the single stranded portion of DNA and promotes annealing of the two single stranded DNA segments at repetitive regions. Once RAD52 binds XFP/ERCC1 removes DNA flaps to make the DNA more suitable for ligation.

[0187] “SCD target point position,” as used herein, refers to a target position in the HBB gene, typically a single nucleotide, which, if mutated, can result in a protein having a mutant amino acid and give rise to SCD. In an embodiment, the SCD target position is the target position at which a change can give rise to an E6 mutant protein, e.g., a protein having an E6V substitution.

[0188] “Subject,” as used herein, may mean either a human or non-human animal. The term includes, but is not limited to, mammals (e.g., humans, other primates, pigs, rodents (e.g., mice and rats or hamsters), rabbits, guinea pigs, cows, horses, cats, dogs, sheep, and goats). In an embodiment, the subject is a human. In another embodiment, the subject is poultry. In another embodiment, the subject is piscine. In certain embodiments, the subject is a human, and in certain of these embodiments the human is an infant, child, young adult, or adult.

[0189] As used herein, the terms “target nucleic acid” or “target gene” refer to a nucleic acid which is being targeted for alteration, e.g., by gene conversion, by a Cas9 system described herein. In certain embodiments, a target nucleic acid comprises one gene. In certain embodiments, a target nucleic acid may comprise one or more genes, e.g., two genes, three genes, four genes, or five genes. In one embodiment, a target nucleic acid may comprise a promoter region, or control region, of a gene. In one embodiment, a target nucleic acid may comprise an intron of a gene. In another embodiment, a target nucleic acid may comprise an exon of a gene. In one embodiment, a target nucleic acid may comprise a coding region of gene. In one embodiment, a target nucleic acid may comprise a non-coding region of a gene. In some embodiments, the target gene is an HBB gene. In other embodiments, the target gene is an SMN1 gene. In some embodiments, the target gene is an NCF1 (p47-PHOX) gene.

[0190] “Target position” as used herein, refers to a site on a target nucleic acid that is modified by a Cas9 molecule-dependent process. For example, the target position can be modified by a Cas9 molecule-mediated cleavage of the target nucleic acid and template nucleic acid directed modification, e.g., correction, of the target position. In an embodiment, a target position can be a site between two nucleotides, e.g., adjacent nucleotides, on the target nucleic acid into which one or more nucleotides is added based on homology with a template nucleic acid. The target position may comprise one or more nucleotides that are altered, e.g., corrected, based on homology with a template nucleic acid. In another embodiment, the target position may comprise one or more nucleotides that are deleted based on homology with a template nucleic acid. In an embodiment, the target position is within a “target sequence” (e.g., the sequence to which the gRNA binds). In an embodiment, a target position is upstream or downstream of a target sequence (e.g., the sequence to which the gRNA binds).

[0191] “Target region,” “target domain,” or “target sequence,” as used herein, is a nucleic acid sequence that comprises a target position and at least one nucleotide position outside the target position. In certain embodiments, the target position is flanked by sequences of the target position region, i.e., the target position is disposed in the target position region such that there are target position region sequences both 5′ and 3′ to the target position. In certain embodiments, the target position region provides sufficient sequences on each side (i.e., 5′ and 3′) of the target position to allow gene conversion of the target position, wherein the gene conversion uses an endogenous sequence homologous with the target position region as a template.

[0192] A “template nucleic acid,” as the term is used herein, refers to a nucleic acid sequence which can be used in conjunction with a Cas9 molecule and a gRNA molecule to alter the structure of a target position. In an embodiment, the target nucleic acid is modified to have the some or all of the sequence of the template nucleic acid, typically at or near cleavage site(s). In an embodiment, the template nucleic acid is single stranded. In an alternate embodiment, the template nucleic acid is double stranded. In an embodiment, the template nucleic acid is DNA, e.g., double stranded DNA. In an alternate embodiment, the template nucleic acid is single stranded DNA. In an embodiment, the template nucleic acid is RNA, e.g., double stranded RNA or single stranded RNA. In an embodiment, the template nucleic acid is encoded on the same vector backbone, e.g., AAV genome, plasmid DNA, as the Cas9 and gRNA. In an embodiment, the template nucleic acid is excised from a vector backbone in vivo, e.g., it is flanked by gRNA recognition sequences. In one embodiment, the template DNA is in an ILDV. In one embodiment, the template nucleic acid is an exogenous nucleic acid sequence. In another embodiment, the template nucleic acid sequence is an endogenous nucleic acid sequence, e.g., an endogenhous homologous region. In one embodiment, the template nucleic acid is a single stranded oligonucleotide corresponding to a plus strand of a nucleic acid sequence. In another embodiment, the template nucleic acid is a single stranded oligonucleotide corresponding to a minus strand of a nucleic acid sequence.

[0193] “Treat,” “treating” and “treatment,” as used herein, mean the treatment of a disease in a mammal, e.g., in a human, including (a) inhibiting the disease, i.e., arresting or preventing its development or progression; (b) relieving the disease, i.e., causing regression of the disease state; and (c) relieving one or more symptoms of the disease; and (d) curing the disease.

[0194] “Prevent,” “preventing” and “prevention,” as used herein, means the prevention of a disease in a mammal, e.g., in a human, including (a) avoiding or precluding the disease; (b) affecting the predisposition toward the disease (c) preventing or delaying the onset of at least one symptom of the disease.

[0195] An “up-regulator”, as used herein, refers to an agent that directly increases the activity of a specified biological pathway. Directly increasing the activity of the pathway refers to (i) the up-regulator binding to a component of that pathway (e.g., a protein that acts in the pathway or an mRNA encoding that protein) and increasing the level or activity of that component, e.g., by increasing the concentration or specific activity of that component, or (ii) the up-regulator is an added amount of a component that is ordinarily present in the pathway at a given level, e.g., an overexpressed protein. An up-regulator may, e.g., speed up one of the steps of that pathway or increase the level or activity of a component in that pathway. An up-regulator may be, e.g., a protein in the pathway, e.g., one may overexpress a protein that is ordinarily in the pathway to increase the overall activity of the pathway. The pathway may be, e.g., a DNA damage repair pathway, for example, HDR, e.g., gene conversion. In an embodiment, the increased level or activity is compared to what would be seen in the absence of the up-regulator.

[0196] “Wild type”, as used herein, refers to a gene or polypeptide which has the characteristics, e.g., the nucleotide or amino acid sequence, of a gene or polypeptide from a naturally-occurring source. The term “wild type” typically includes the most frequent observation of a particular gene or polypeptide in a population of organisms found in nature.

[0197] “X” as used herein in the context of an amino acid sequence, refers to any amino acid (e.g., any of the twenty natural amino acids) unless otherwise specified.

[0198] Sickle Cell Disease and Methods of Repairing Mutation(s) in the HBB Gene

[0199] Sickle Cell Disease (SCD), also known as Sickle Cell Anemia (SCA), is a common inherited hematologic disease which affects 80,000-90,000 people in the United States. It is common in people of African descent and in Hispanic-Americans, with the prevalence of SCD being 1 in 500 and 1 in 1,000, respectively.

[0200] SCD is caused by a mutation in the beta-globin (HBB) gene. HBB is located on chromosome 11 within the HBB gene cluster, which includes genes encoding the delta globin chain, A gamma chain, G gamma chain. The alpha-globin gene is located on chromosome 16. A point mutation (e.g., GAG→GTG) results in the substitution of valine for glutamic acid at amino acid position 6 in exon 1 of the HBB gene. Beta hemoglobin chains with this mutation are expressed as HbS. The disease is inherited in an autosomal recessive manner, so that only patients with two HbS alleles have SCD. Subjects who have sickle cell trait (are heterozygous for HbS) only display a phenotype if they are severely dehydrated or oxygen deprived.

[0201] Normal adult hemoglobin (Hb) is composed of a tetramer made from two alpha-globin chains and two beta-globin chains. In SCD, the valine at position 6 of the beta-chain is hydrophobic and causes a change in conformation of the beta-globin protein when it is not bound to oxygen. HbS is more likely to polymerize and leads to the characteristic sickle shaped red blood cells (RBCs) found in SCD.

[0202] Sickle shape RBCs cause multiple manifestations of disease, which include, e.g., anemia, sickle cell crises, vaso-occlusive crises, aplastic crises and acute chest syndrome. The disease has various manifestations, e.g., vaso-occlusive crisis, splenic sequestration crisis and anemia. Subjects may also suffer from acute chest crisis and infarcts of extremities, end organs and central nervous system. Current treatments for SCD include, e.g., hydration, transfusion, analgesics, the use of hydroxyurea, supplementation with folic acid, penicillin prophylaxis during childhood, and bone marrow transplants. However, there remains a need for additional methods and compositions that can be used to cure, not just treat, sickle cell disease and other genetic diseases.

[0203] One approach to treat or prevent SCD is to repair (i.e., correct) one or more mutations in the HBB gene. In this approach, mutant HBB allele(s) are corrected and restored to wild type state. While not wishing to be bound by theory, it is believed that correction of the glutamic acid to valine substitution at amino acid 6 in the beta-globin gene restores wild type beta-globin production within erythroid cells. The instant disclosure provides methods for modifying target genes, such as HBB, for repair by gene conversion using an endogenous homologous region, such as a region of the HBD gene. Specifically, the instant disclosure increases the rates of repair by gene conversion as compared to previously disclosed technologies. The methods described herein can be performed in all cell types, including mammalian and human cells. Specifically with respect to SCD, beta-globin is expressed in cells of erythroid cell lineage. Thus, in one embodiment, an erythroid cell is targeted.

[0204] While much of the disclosure herein is presented in the context of the mutation in the HBB gene that gives rise to an E6 mutant protein (e.g., E6V mutant protein), the methods and compositions herein are broadly applicable to any mutation, e.g., a point mutation or a deletion, in any gene, including promoters and control regions of a gene, that gives rise to any disease.

[0205] In an embodiment, one HBB allele is repaired in the subject. In another embodiment, both HBB alleles are repaired in the subject. In either situation, the subject can be cured of disease. As the disease only displays a phenotype when both alleles are mutated, repair of a single allele is adequate for a cure.

[0206] In one aspect, methods and compositions discussed herein, provide for the correction of the underlying genetic cause of SCD, e.g., the correction of a mutation at a target position in the HBB gene, e.g., correction of a mutation at amino acid position 6, e.g., an E6V substitution in the HBB gene.

[0207] In an embodiment, the method provides for the correction of a mutation at a target position in the HBB gene, e.g., correction of a mutation at amino acid position 6, e.g., an E6V substitution in the HBB gene. As described herein, in one embodiment, the method comprises the introduction of one or more breaks (e.g., single-strand breaks or double-strand breaks) sufficiently close to (e.g., either 5′ or 3′ to) the target position in the HBB gene, e.g., E6V.

[0208] In an embodiment, the targeting domain of the gRNA molecule is configured to provide a cleavage event, e.g., a double-strand break or a single-strand break, sufficiently close to (e.g., either 5′ or 3′ to) the target position in the HBB gene, e.g., E6V to allow correction, e.g., an alteration in the HBB gene, e.g., an alternation associated with HDR. In an embodiment, the targeting domain is configured such that a cleavage event, e.g., a double-strand or single-strand break, is positioned within 1, 2, 3, 4, 5, 10, 15, 20, 25, 30, 35, 40, 45, 50, 60, 70, 80, 90, 100, 150, 200, 250, 300, 350, 400, 450 or 500 nucleotides of a the target position in the HBB gene, e.g., E6V. The break, e.g., a double-strand or single-strand break, can be positioned upstream or downstream of the target position in the HBB gene, e.g., E6V.

[0209] In an embodiment, a second, third and/or fourth gRNA molecule is configured to provide a cleavage event, e.g., a double-strand break or a single-strand break, sufficiently close to (e.g., either 5′ or 3′ to) the target position in the HBB gene, e.g., E6V to allow correction, e.g., an alteration associated with HDR in the HBB gene. In an embodiment, the targeting domain is configured such that a cleavage event, e.g., a double-strand or single-strand break, is positioned within 1, 2, 3, 4, 5, 10, 15, 20, 25, 30, 35, 40, 45, 50, 60, 70, 80, 90, 100, 150, 200, 250, 300, 350, 400, 450 or 500 nucleotides of a the target position in the HBB gene, e.g., E6V. The break, e.g., a double-strand or single-strand break, can be positioned upstream or downstream of the target position in the HBB gene, e.g., E6V.

[0210] In an embodiment, a single-strand break is accompanied by an additional single-strand break, positioned by a second, third and/or fourth gRNA molecule, as discussed below. For example, the targeting domains bind configured such that a cleavage event, e.g., the two single-strand breaks, are positioned within 1, 2, 3, 4, 5, 10, 15, 20, 25, 30, 35, 40, 45, 50, 60, 70, 80, 90, 100, 150, 200, 250, 300, 350, 400, 450 or 500 nucleotides of the target position in the HBB gene, e.g., E6V. In an embodiment, the first and second gRNA molecules are configured such, that when guiding a Cas9 nickase, a single-strand break is accompanied by an additional single-strand break, positioned by a second gRNA molecule, sufficiently close to one another to result in an alteration of the target position in the HBB gene, e.g., E6V. In an embodiment, the first and second gRNA molecules are configured such that a single-strand break positioned by said second gRNA is within 10, 20, 30, 40, or 50 nucleotides of the break positioned by said first gRNA molecule, e.g., when the Cas9 is a nickase. In an embodiment, the two gRNA molecules are configured to position cuts at the same position, or within a few nucleotides of one another, on different strands, e.g., essentially mimicking a double-strand break.

[0211] In an embodiment, a double-strand break can be accompanied by an additional double-strand break, positioned by a second, third and/or fourth gRNA molecule, as is discussed below. For example, the targeting domain of a first gRNA molecule is configured such that a double-strand break is positioned upstream of the target position in the HBB gene, e.g., E6V, e.g., within 1, 2, 3, 4, 5, 10, 15, 20, 25, 30, 35, 40, 45, 50, 60, 70, 80, 90, 100, 150, 200, 250, 300, 350, 400, 450 or 500 nucleotides of the target position; and the targeting domain of a second gRNA molecule is configured such that a double-strand break is positioned downstream the target position in the HBB gene, e.g., E6V, e.g., within 1, 2, 3, 4, 5, 10, 15, 20, 25, 30, 35, 40, 45, 50, 60, 70, 80, 90, 100, 150, 200, 250, 300, 350, 400, 450 or 500 nucleotides of the target position.

[0212] In an embodiment, a double-strand break can be accompanied by two additional single-strand breaks, positioned by a second gRNA molecule and a third gRNA molecule. For example, the targeting domain of a first gRNA molecule is configured such that a double-strand break is positioned upstream of the target position in the HBB gene, e.g., E6V, e.g., within 1, 2, 3, 4, 5, 10, 15, 20, 25, 30, 35, 40, 45, 50, 60, 70, 80, 90, 100, 150, 200, 250, 300, 350, 400, 450 or 500 nucleotides of the target position; and the targeting domains of a second and third gRNA molecule are configured such that two single-strand breaks are positioned downstream of the target position in the HBB gene, e.g., E6V, e.g., within 1, 2, 3, 4, 5, 10, 15, 20, 25, 30, 35, 40, 45, 50, 60, 70, 80, 90, 100, 150, 200, 250, 300, 350, 400, 450 or 500 nucleotides of the target position. In an embodiment, the targeting domain of the first, second and third gRNA molecules are configured such that a cleavage event, e.g., a double-strand or single-strand break, is positioned, independently for each of the gRNA molecules.

[0213] In an embodiment, a first and second single-strand breaks can be accompanied by two additional single-strand breaks positioned by a third gRNA molecule and a fourth gRNA molecule. For example, the targeting domain of a first and second gRNA molecule are configured such that two single-strand breaks are positioned upstream of the target position in the HBB gene, e.g., E6V, e.g., within 1, 2, 3, 4, 5, 10, 15, 20, 25, 30, 35, 40, 45, 50, 60, 70, 80, 90, 100, 150, 200, 250, 300, 350, 400, 450 or 500 nucleotides of the target position in the HBB gene, e.g., E6V; and the targeting domains of a third and fourth gRNA molecule are configured such that two single-strand breaks are positioned downstream of the target position in the HBB gene, e.g., E6V, e.g., within 1, 2, 3, 4, 5, 10, 15, 20, 25, 30, 35, 40, 45, 50, 60, 70, 80, 90, 100, 150, 200, 250, 300, 350, 400, 450 or 500 nucleotides of the target position in the HBB gene, e.g., E6V.

[0214] In an embodiment, a mutation in the HBB gene, e.g., E6V is corrected using an exogenously provided template nucleic acid, e.g., by HDR. In another embodiment, a mutation in the HBB gene, e.g., E6V is corrected without using an exogenously provided template nucleic acid, e.g., by HDR. In an embodiment, alteration of the target sequence occurs with an endogenous genomic donor sequence, e.g., by HDR. In an embodiment, the endogenous genomic donor sequence comprises one or more nucleotides derived from the HBD gene. In an embodiment, a mutation in the HBB gene, e.g., E6V is corrected by an endogenous genomic donor sequence (e.g., an HBD gene). In an embodiment, an eaCas9 molecule, e.g., an eaCas9 molecule described herein, is used. In an embodiment, the eaCas9 molecule comprises HNH-like domain cleavage activity but has no, or no significant, N-terminal RuvC-like domain cleavage activity. In an embodiment, the eaCas9 molecule is an HNH-like domain nickase. In an embodiment, the eaCas9 molecule comprises a mutation at D10 (e.g., D10A). In an embodiment, the eaCas9 molecule comprises N-terminal RuvC-like domain cleavage activity but has no, or no significant, HNH-like domain cleavage activity. In an embodiment, the eaCas9 molecule is an N-terminal RuvC-like domain nickase. In an embodiment, the eaCas9 molecule comprises a mutation at H840 (e.g., H840A) or N863 (e.g., N863A).

[0215] Methods to Treat or Prevent Sickle Cell Disease (SCD)

[0216] Disclosed herein are the approaches to treat or prevent SCD, using the compositions and methods described herein.

[0217] One approach to treat or prevent disease, e.g., SCD, is to repair (i.e., correct) one or more mutations in a target gene, e.g., a HBB gene, e.g., by gene conversion, using an endogenous homologous region. In this approach, mutant HBB allele(s) are corrected and restored to wild type state. While not wishing to be bound by theory, it is believed that correction of the glutamic acid to valine substitution at amino acid 6 in the beta-globin gene restores wild type beta-globin production within erythroid cells. The method described herein can be performed in all cell types. Beta-globin is expressed in cells of erythroid cell lineage. In an embodiment, an erythroid cell is targeted.

[0218] In an embodiment, one HBB allele is repaired in the subject. In another embodiment, both HBB alleles are repaired in the subject. In either situation, the subjects can be cured of disease. As the disease only displays a phenotype when both alleles are mutated, repair of a single allele is adequate for a cure.

[0219] In an embodiment, the method comprises initiating treatment of a subject prior to disease onset.

[0220] In an embodiment, the method comprises initiating treatment of a subject after disease onset.

[0221] In an embodiment, the method comprises initiating treatment of a subject well after disease onset, e.g., 1, 2, 3, 4, 5, 6, 7, 8, 9, 10, 12, 16, 24, 36, 48 or more months after onset of disease. While not wishing to be bound by theory it is believed that this treatment may be effective if subjects present well into the course of illness.

[0222] In an embodiment, the method comprises initiating treatment of a subject in an advanced stage of disease.

[0223] Overall, initiation of treatment for subjects at all stages of disease is expected to prevent negative consequences of disease and be of benefit to subjects.

[0224] In an embodiment, the method comprises initiating treatment of a subject prior to disease expression. In an embodiment, the method comprises initiating treatment of a subject in an early stage of disease, e.g., when a subject has tested positive for beta-thalassemia mutations but has no signs or symptoms associated with beta-thalassemia major, minor or intermedia.

[0225] In an embodiment, the method comprises initiating treatment of a subject at the appearance of microcytic anemia, e.g., in an infant, child, adult or young adult.

[0226] In an embodiment, the method comprises initiating treatment of a subject who is transfusion-dependent.

[0227] In an embodiment, the method comprises initiating treatment of a subject who has tested positive for a mutation in a beta globin gene.

[0228] In an embodiment, the method comprises initiating treatment at the appearance of any one or more of the following findings associated or consistent with beta-thalassemia major or beta-thalassemia minor: anemia, diarrhea, fever, failure to thrive, frontal bossing, broken long bones, hepatomegaly, splenomegaly, thrombosis, pulmonary embolus, stroke, leg ulcer, cardiomyopathy, cardiac arrhythmia, and evidence of extramedullary erythropoiesis.

[0229] In an embodiment, a cell is treated, e.g., ex vivo. In an embodiment, an ex vivo treated cell is returned to a subject.

[0230] In an embodiment, allogenic or autologous bone marrow or erythroid cells are treated ex vivo. In an embodiment, an ex vivo treated allogenic or autologous bone marrow or erythroid cells are administered to the subject. In an embodiment, an erythroid cell, e.g., an autologous erythroid cell, is treated ex vivo and returned to the subject. In an embodiment, an autologous stem cell, is treated ex vivo and returned to the subject. In an embodiment, the modified HSCs are administered to the patient following no myeloablative pre-conditioning. In an embodiment, the modified HSCs are administered to the patient following mild myeloablative pre-conditioning such that following engraftment, some of the hematopoietic cells are derived from the modified HSCs. In other aspects, the HSCs are administered after full myeloablation such that following engraftment, 100% of the hematopoietic cells are derived from the modified HSCs.

[0231] In an embodiment, the method comprises delivery of a gRNA molecule and Cas9 molecule by intravenous injection, intramuscular injection, subcutaneous injection, or intra-bone marrow (IBM) injection.

[0232] In an embodiment, the method comprises delivery of a gRNA molecule and/or a Cas9 molecule by an AAV. In an embodiment, the method comprises delivery of a gRNA molecule and/or a Cas9 molecule by a lentivirus. In an embodiment, the method comprises delivery of a gRNA molecule and/or a Cas9 molecule by a nanoparticle. In an embodiment, the method comprises delivery of a gRNA molecule by a parvovirus, e.g., a modified parvovirus specifically designed to target bone marrow cells and/or CD4+ cells. In an embodiment, two or more gRNA molecules (e.g., a second, third or fourth gRNA molecules) are delivered.

[0233] Other Methods to Treat Sickle Cell Disease

[0234] In healthy individuals, two beta-globin molecules pair with two alpha-globin molecules to form normal hemoglobin (Hb). In SCD, mutations in the beta-globin (HBB) gene, e.g., a point mutation (GAG→GTG) that results in the substitution of valine for glutamic acid at amino acid position 6 of the beta-globin molecule, cause production of sickle hemoglobin (HbS). HbS is more likely to polymerize and leads to the characteristic sickle shaped red blood cells (RBCs). Sickle shaped RBCs give rise to multiple manifestations of disease, such as, anemia, sickle cell crises, vaso-occlusive crises, aplastic crises and acute chest syndrome. Alpha-globin can also pair with fetal hemoglobin (HbF), which significantly moderates the severe anemia and other symptoms of SCD. However, the expression of HbF is negatively regulated by the BCL11A gene product.

[0235] Methods and compositions disclosed herein provide a number of approaches for treating SCD. As is discussed infra, methods described herein provide for treating SCD by correcting a target position in the HBB gene to provide corrected, or functional, e.g., wild type, beta-globin. Methods and compositions discussed herein can be used in combination with targeting a second gene, e.g., a gene other than the HBB gene, e.g., the BCL11A gene (also known as B-cell CLL/lymphoma 11A, BCL11A-L, BCL11A-S, BCL11A-XL, CTIP1, HBFQTL5 and ZNF), e.g., by a CRISPR/Cas related method. BCL11A encodes a zinc-finger protein that is involved in the regulation of globin gene expression. By altering the BCL11A gene (e.g., one or both alleles of the BCL11A gene), the levels of gamma globin can be increased. Gamma globin can replace beta globin in the hemoglobin complex and effectively carry oxygen to tissues, thereby ameliorating SCD disease phenotypes. Altering the BCL11A gene herein refers to reducing or eliminating (1) BCL11A gene expression, (2) BCL11A protein function, or (3) the level of BCL11A protein. In an embodiment, an SCD target knockdown position is targeted. In another embodiment, an SCD target knockdown position is targeted.

[0236] “SCD target knockout position”, as used herein, refers to a position in the BCL11A gene, which if altered, e.g., disrupted by insertion or deletion of one or more nucleotides, e.g., by NHEJ-mediated alteration, results in reduction or elimination of expression of functional BCL11A gene product. In an embodiment, the position is in the BCL11A coding region, e.g., an early coding region. In an embodiment, the position is in the BCL11A non-coding region, e.g., an enhancer region.

[0237] “SCD target knockdown position”, as used herein, refers to a position, e.g., in the BCL11A gene, which if targeted by an eiCas9 or an eiCas9 fusion described herein, results in reduction or elimination of expression of functional BCL11A gene product. In an embodiment, transcription is reduced or eliminated. In an embodiment, the position is in the BCL11A promoter sequence. In an embodiment, a position in the promoter sequence of the BCL11A gene is targeted by an enzymatically inactive Cas9 (eiCas9) or an eiCas9-fusion protein, as described herein.

I. Guide RNA (gRNA) Molecules

[0238] A gRNA molecule, as that term is used herein, refers to a nucleic acid that promotes the specific targeting or homing of a gRNA molecule/Cas9 molecule complex to a target nucleic acid. gRNA molecules can be unimolecular (having a single RNA molecule) (e.g., chimeric or modular (comprising more than one, and typically two, separate RNA molecules). The gRNA molecules provided herein comprise a targeting domain comprising, consisting of, or consisting essentially of a nucleic acid sequence fully or partially complementary to a target domain. In certain embodiments, the gRNA molecule further comprises one or more additional domains, including for example a first complementarity domain, a linking domain, a second complementarity domain, a proximal domain, a tail domain, and a 5′ extension domain. Each of these domains is discussed in detail below. Additional details on gRNAs are provided in Section I entitled “gRNA molecules” of PCT Application WO 2015/048577, the entire contents of which are expressly incorporated herein by reference. In certain embodiments, one or more of the domains in the gRNA molecule comprises an amino acid sequence identical to or sharing sequence homology with a naturally occurring sequence, e.g., from S. pyogenes, S. aureus, or S. thermophilus.

[0239] In certain embodiments, a unimolecular, or chimeric, gRNA comprises, preferably from 5′ to 3′:
[0240] a targeting domain complementary to a target domain in a HBB gene, e.g., a targeting domain from any of SEQ ID NOs: 387-485, 6803-6871, or 16010-16256;
[0241] a first complementarity domain;
[0242] a linking domain;
[0243] a second complementarity domain (which is complementary to the first complementarity domain);
[0244] a proximal domain; and
[0245] optionally, a tail domain.

[0246] In certain embodiments, a modular gRNA comprises:
[0247] a first strand comprising, preferably from 5′ to 3′:
   [0248] a targeting domain (which is complementary to a target domain in the HBB gene), e.g., a targeting domain from any one of SEQ ID NOs: 387-485, 6803-6871, or 16010-16256; and
   [0249] a first complementarity domain; and
[0250] a second strand, comprising, preferably from 5′ to 3′:
   [0251] optionally, a 5′ extension domain;
   [0252] a second complementarity domain;
   [0253] a proximal domain; and
   [0254] optionally, a tail domain.

[0255] Each of these domains are described in more detail, below.

[0256] Targeting Domain

[0257] The targeting domain (sometimes referred to alternatively as the guide sequence or complementarity region) comprises, consists of, or consists essentially of a nucleic acid sequence that is complementary or partially complementary to a target nucleic acid sequence, e.g., a target nucleic acid sequence in a HBB target gene. The nucleic acid sequence in a target gene, e.g., HBB, to which all or a portion of the targeting domain is complementary or partially complementary is referred to herein as the target domain. In certain embodiments, the target domain comprises a target position within the target gene, e.g., HBB. In other embodiments, a target position lies outside (i.e., upstream or downstream of) the target domain. In certain embodiments, the target domain is located entirely within a target gene, e.g., in a coding region, an intron, or an exon. In other embodiments, all or part of the target domain is located outside of a target gene, e.g., in a control region or in a non-coding region.

[0258] Methods for selecting targeting domains are known in the art (see, e.g., Fu 2014; Sternberg 2014). Examples of suitable targeting domains for use in the methods, compositions, and kits described herein include those set forth in SEQ ID NOs: 387-485, 6803-6871, or 16010-16256.

[0259] The strand of the target nucleic acid comprising the target domain is referred to herein as the “complementary strand” because it is complementary to the targeting domain sequence. Since the targeting domain is part of a gRNA molecule, it comprises the base uracil (U) rather than thymine (T); conversely, any DNA molecule encoding the gRNA molecule will comprise thymine rather than uracil. In a targeting domain/target domain pair, the uracil bases in the targeting domain will pair with the adenine bases in the target domain. In certain embodiments, the degree of complementarity between the targeting domain and target domain is sufficient to allow targeting of a Cas9 molecule to the target nucleic acid.

[0260] In certain embodiments, the targeting domain comprises a core domain and an optional secondary domain. In certain of these embodiments, the core domain is located 3′ to the secondary domain, and in certain of these embodiments the core domain is located at or near the 3′ end of the targeting domain. In certain of these embodiments, the core domain consists of or consists essentially of about 8 to about 13 nucleotides at the 3′ end of the targeting domain. In certain embodiments, only the core domain is complementary or partially complementary to the corresponding portion of the target domain, and in certain of these embodiments the core domain is fully complementary to the corresponding portion of the target domain. In other embodiments, the secondary domain is also complementary or partially complementary to a portion of the target domain. In certain embodiments, the core domain is complementary or partially complementary to a core domain target in the target domain, while the secondary domain is complementary or partially complementary to a secondary domain target in the target domain. In certain embodiments, the core domain and secondary domain have the same degree of complementarity with their respective corresponding portions of the target domain. In other embodiments, the degree of complementarity between the core domain and its target and the degree of complementarity between the secondary domain and its target may differ. In certain of these embodiments, the core domain may have a higher degree of complementarity for its target than the secondary domain, whereas in other embodiments the secondary domain may have a higher degree of complementarity than the core domain.

[0261] In certain embodiments, the targeting domain and/or the core domain within the targeting domain is 3 to 100, 5 to 100, 10 to 100, or 20 to 100 nucleotides in length, and in certain of these embodiments the targeting domain or core domain is 3 to 15, 3 to 20, 5 to 20, 10 to 20, 15 to 20, 5 to 50, 10 to 50, or 20 to 50 nucleotides in length. In certain embodiments, the targeting domain and/or the core domain within the targeting domain is 6, 7, 8, 9, 10, 11, 12, 13, 14, 15, 16, 17, 18, 19, 20, 21, 22, 23, 24, 25, or 26 nucleotides in length. In certain embodiments, the targeting domain and/or the core domain within the targeting domain is 6+/−2, 7+/−2, 8+/−2, 9+/−2, 10+/−2, 10+/−4, 10+/−5, 11+/−2, 12+/−2, 13+/−2, 14+/−2, 15+/−2, or 16+−2, 20+/−5, 30+/−5, 40+/−5, 50+/−5, 60+/−5, 70+/−5, 80+/−5, 90+/−5, or 100+/−5 nucleotides in length.

[0262] In certain embodiments wherein the targeting domain includes a core domain, the core domain is 3 to 20 nucleotides in length, and in certain of these embodiments the core domain 5 to 15 or 8 to 13 nucleotides in length. In certain embodiments wherein the targeting domain includes a secondary domain, the secondary domain is 0, 1, 2, 3, 4, 5, 6, 7, 8, 9, 10, 11, 12, 13, 14 or 15 nucleotides in length. In certain embodiments wherein the targeting domain comprises a core domain that is 8 to 13 nucleotides in length, the targeting domain is 26, 25, 24, 23, 22, 21, 20, 19, 18, 17, or 16 nucleotides in length, and the secondary domain is 13 to 18, 12 to 17, 11 to 16, 10 to 15, 9 to 14, 8 to 13, 7 to 12, 6 to 11, 5 to 10, 4 to 9, or 3 to 8 nucleotides in length, respectively.

[0263] In certain embodiments, the targeting domain is fully complementary to the target domain. Likewise, where the targeting domain comprises a core domain and/or a secondary domain, in certain embodiments one or both of the core domain and the secondary domain are fully complementary to the corresponding portions of the target domain. In other embodiments, the targeting domain is partially complementary to the target domain, and in certain of these embodiments where the targeting domain comprises a core domain and/or a secondary domain, one or both of the core domain and the secondary domain are partially complementary to the corresponding portions of the target domain. In certain of these embodiments, the nucleic acid sequence of the targeting domain, or the core domain or targeting domain within the targeting domain, is at least 80%, 85%, 90%, or 95% complementary to the target domain or to the corresponding portion of the target domain. In certain embodiments, the targeting domain and/or the core or secondary domains within the targeting domain include one or more nucleotides that are not complementary with the target domain or a portion thereof, and in certain of these embodiments the targeting domain and/or the core or secondary domains within the targeting domain include 1, 2, 3, 4, 5, 6, 7, or 8 nucleotides that are not complementary with the target domain. In certain embodiments, the core domain includes 1, 2, 3, 4, or 5 nucleotides that are not complementary with the corresponding portion of the target domain. In certain embodiments wherein the targeting domain includes one or more nucleotides that are not complementary with the target domain, one or more of said non-complementary nucleotides are located within five nucleotides of the 5′ or 3′ end of the targeting domain. In certain of these embodiments, the targeting domain includes 1, 2, 3, 4, or 5 nucleotides within five nucleotides of its 5′ end, 3′ end, or both its 5′ and 3′ ends that are not complementary to the target domain. In certain embodiments wherein the targeting domain includes two or more nucleotides that are not complementary to the target domain, two or more of said non-complementary nucleotides are adjacent to one another, and in certain of these embodiments the two or more consecutive non-complementary nucleotides are located within five nucleotides of the 5′ or 3′ end of the targeting domain. In other embodiments, the two or more consecutive non-complementary nucleotides are both located more than five nucleotides from the 5′ and 3′ ends of the targeting domain.

[0264] In an embodiment, the gRNA molecule, e.g., a gRNA molecule comprising a targeting domain, which is complementary with the HBB gene, is a modular gRNA molecule. In another embodiment, the gRNA molecule is a unimolecular or chimeric gRNA molecule.

[0265] In an embodiment, the nucleic acid encodes a gRNA molecule, e.g., the first gRNA molecule, comprising a targeting domain comprising a sequence that is the same as, or differs by no more than 1, 2, 3, 4, or 5 nucleotides from, a targeting domain sequence described herein, e.g., a targeting domain sequence from any one of Tables 1-3. In an embodiment, the nucleic acid encodes a gRNA molecule comprising a targeting domain described herein, e.g., selected from those in Tables 1-3.

[0266] In certain embodiments, the targeting domain comprises 16 nucleotides. In certain embodiments, the targeting domain comprises 17 nucleotides. In certain embodiments, the targeting domain comprises 18 nucleotides. In certain embodiments, the targeting domain comprises 19 nucleotides. In certain embodiments, the targeting domain comprises 20 nucleotides. In certain embodiments, the targeting domain comprises 21 nucleotides. In certain embodiments, the targeting domain comprises 22 nucleotides. In certain embodiments, the targeting domain comprises 23 nucleotides. In certain embodiments, the targeting domain comprises 24 nucleotides. In certain embodiments, the targeting domain comprises 25 nucleotides. In certain embodiments, the targeting domain comprises 26 nucleotides.

[0267] In certain embodiments, the targeting domain which is complementary with the HBB gene is 16 nucleotides or more in length. In certain embodiments, the targeting domain is 16 nucleotides in length. In certain embodiments, the targeting domain is 17 nucleotides in length. In another embodiment, the targeting domain is 18 nucleotides in length. In still another embodiment, the targeting domain is 19 nucleotides in length. In still another embodiment, the targeting domain is 20 nucleotides in length. In still another embodiment, the targeting domain is 21 nucleotides in length. In still another embodiment, the targeting domain is 22 nucleotides in length. In still another embodiment, the targeting domain is 23 nucleotides in length. In still another embodiment, the targeting domain is 24 nucleotides in length. In still another embodiment, the targeting domain is 25 nucleotides in length. In still another embodiment, the targeting domain is 26 nucleotides in length.

[0268] In an embodiment, a nucleic acid encodes a modular gRNA molecule, e.g., one or more nucleic acids encode a modular gRNA molecule. In another embodiment, a nucleic acid encodes a chimeric gRNA molecule. The nucleic acid may encode a gRNA molecule, e.g., the first gRNA molecule, comprising a targeting domain comprising 16 nucleotides or more in length. In one embodiment, the nucleic acid encodes a gRNA molecule, e.g., the first gRNA molecule, comprising a targeting domain that is 16 nucleotides in length. In another embodiment, the nucleic acid encodes a gRNA molecule, e.g., the first gRNA molecule, comprising a targeting domain that is 17 nucleotides in length. In still another embodiment, the nucleic acid encodes a gRNA molecule, e.g., the first gRNA molecule, comprising a targeting domain that is 18 nucleotides in length. In still another embodiment, the nucleic acid encodes a gRNA molecule, e.g., the first gRNA molecule, comprising a targeting domain that is 19 nucleotides in length. In still another embodiment, the nucleic acid encodes a gRNA molecule, e.g., the first gRNA molecule, comprising a targeting domain that is 20 nucleotides in length. In still another embodiment, the nucleic acid encodes a gRNA molecule, e.g., the first gRNA molecule, comprising a targeting domain that is 21 nucleotides in length. In still another embodiment, the nucleic acid encodes a gRNA molecule, e.g., the first gRNA molecule, comprising a targeting domain that is 22 nucleotides in length. In still another embodiment, the nucleic acid encodes a gRNA molecule, e.g., the first gRNA molecule, comprising a targeting domain that is 23 nucleotides in length. In still another embodiment, the nucleic acid encodes a gRNA molecule, e.g., the first gRNA molecule, comprising a targeting domain that is 24 nucleotides in length. In still another embodiment, the nucleic acid encodes a gRNA molecule, e.g., the first gRNA molecule, comprising a targeting domain that is 25 nucleotides in length. In still another embodiment, the nucleic acid encodes a gRNA molecule, e.g., the first gRNA molecule, comprising a targeting domain that is 26 nucleotides in length.

[0269] In certain embodiments, the targeting domain, core domain, and/or secondary domain do not comprise any modifications. In other embodiments, the targeting domain, core domain, and/or secondary domain, or one or more nucleotides therein, have a modification, including but not limited to the modifications set forth below. In certain embodiments, one or more nucleotides of the targeting domain, core domain, and/or secondary domain may comprise a 2′ modification (e.g., a modification at the 2′ position on ribose), e.g., a 2-acetylation, e.g., a 2′ methylation. In certain embodiments, the backbone of the targeting domain can be modified with a phosphorothioate. In certain embodiments, modifications to one or more nucleotides of the targeting domain, core domain, and/or secondary domain render the targeting domain and/or the gRNA comprising the targeting domain less susceptible to degradation or more bio-compatible, e.g., less immunogenic. In certain embodiments, the targeting domain and/or the core or secondary domains include 1, 2, 3, 4, 5, 6, 7, or 8 or more modifications, and in certain of these embodiments the targeting domain and/or core or secondary domains include 1, 2, 3, or 4 modifications within five nucleotides of their respective 5′ ends and/or 1, 2, 3, or 4 modifications within five nucleotides of their respective 3′ ends. In certain embodiments, the targeting domain and/or the core or secondary domains comprise modifications at two or more consecutive nucleotides.

[0270] In certain embodiments wherein the targeting domain includes core and secondary domains, the core and secondary domains contain the same number of modifications. In certain of these embodiments, both domains are free of modifications. In other embodiments, the core domain includes more modifications than the secondary domain, or vice versa.

[0271] In certain embodiments, modifications to one or more nucleotides in the targeting domain, including in the core or secondary domains, are selected to not interfere with targeting efficacy, which can be evaluated by testing a candidate modification using a system as set forth below. gRNAs having a candidate targeting domain having a selected length, sequence, degree of complementarity, or degree of modification can be evaluated using a system as set forth below. The candidate targeting domain can be placed, either alone or with one or more other candidate changes in a gRNA molecule/Cas9 molecule system known to be functional with a selected target, and evaluated.

[0272] In certain embodiments, all of the modified nucleotides are complementary to and capable of hybridizing to corresponding nucleotides present in the target domain. In another embodiment, 1, 2, 3, 4, 5, 6, 7 or 8 or more modified nucleotides are not complementary to or capable of hybridizing to corresponding nucleotides present in the target domain.

[0273] First and Second Complementarity Domains

[0274] The first and second complementarity (sometimes referred to alternatively as the crRNA-derived hairpin sequence and tracrRNA-derived hairpin sequences, respectively) domains are fully or partially complementary to one another. In certain embodiments, the degree of complementarity is sufficient for the two domains to form a duplexed region under at least some physiological conditions. In certain embodiments, the degree of complementarity between the first and second complementarity domains, together with other properties of the gRNA, is sufficient to allow targeting of a Cas9 molecule to a target nucleic acid.

[0275] In certain embodiments the first and/or second complementarity domain includes one or more nucleotides that lack complementarity with the corresponding complementarity domain. In certain embodiments, the first and/or second complementarity domain includes 1, 2, 3, 4, 5, or 6 nucleotides that do not complement with the corresponding complementarity domain. For example, the second complementarity domain may contain 1, 2, 3, 4, 5, or 6 nucleotides that do not pair with corresponding nucleotides in the first complementarity domain. In certain embodiments, the nucleotides on the first or second complementarity domain that do not complement with the corresponding complementarity domain loop out from the duplex formed between the first and second complementarity domains. In certain of these embodiments, the unpaired loop-out is located on the second complementarity domain, and in certain of these embodiments the unpaired region begins 1, 2, 3, 4, 5, or 6 nucleotides from the 5′ end of the second complementarity domain.

[0276] In certain embodiments, the first complementarity domain is 5 to 30, 5 to 25, 7 to 25, 5 to 24, 5 to 23, 7 to 22, 5 to 22, 5 to 21, 5 to 20, 7 to 18, 7 to 15, 9 to 16, or 10 to 14 nucleotides in length, and in certain of these embodiments the first complementarity domain is 5, 6, 7, 8, 9, 10, 11, 12, 13, 14, 15, 16, 17, 18, 19, 20, 21, 22, 23, 24, or 25 nucleotides in length. In certain embodiments, the second complementarity domain is 5 to 27, 7 to 27, 7 to 25, 5 to 24, 5 to 23, 5 to 22, 5 to 21, 7 to 20, 5 to 20, 7 to 18, 7 to 17, 9 to 16, or 10 to 14 nucleotides in length, and in certain of these embodiments the second complementarity domain is 5, 6, 7, 8, 9, 10, 11, 12, 13, 14, 15, 16, 17, 18, 19, 20, 21, 22, 23, 24, 25, or 26 nucleotides in length. In certain embodiments, the first and second complementarity domains are each independently 6+/−2, 7+/−2, 8+/−2, 9+/−2, 10+/−2, 11+/−2, 12+/−2, 13+/−2, 14+/−2, 15+/−2, 16+/−2, 17+/−2, 18+/−2, 19+/−2, or 20+/−2, 21+/−2, 22+/−2, 23+/−2, or 24+/−2 nucleotides in length. In certain embodiments, the second complementarity domain is longer than the first complementarity domain, e.g., 2, 3, 4, 5, or 6 nucleotides longer.

[0277] In certain embodiments, the first and/or second complementarity domains each independently comprise three subdomains, which, in the 5′ to 3′ direction are: a 5′ subdomain, a central subdomain, and a 3′ subdomain. In certain embodiments, the 5′ subdomain and 3′ subdomain of the first complementarity domain are fully or partially complementary to the 3′ subdomain and 5′ subdomain, respectively, of the second complementarity domain.

[0278] In certain embodiments, the 5′ subdomain of the first complementarity domain is 4 to 9 nucleotides in length, and in certain of these embodiments the 5′ domain is 4, 5, 6, 7, 8, or 9 nucleotides in length. In certain embodiments, the 5′ subdomain of the second complementarity domain is 3 to 25, 4 to 22, 4 to 18, or 4 to 10 nucleotides in length, and in certain of these embodiments the 5′ domain is 3, 4, 5, 6, 7, 8, 9, 10, 11, 12, 13, 14, 15, 16, 17, 18, 19, 20, 21, 22, 23, 24, or 25 nucleotides in length. In certain embodiments, the central subdomain of the first complementarity domain is 1, 2, or 3 nucleotides in length. In certain embodiments, the central subdomain of the second complementarity domain is 1, 2, 3, 4, or 5 nucleotides in length. In certain embodiments, the 3′ subdomain of the first complementarity domain is 3 to 25, 4 to 22, 4 to 18, or 4 to 10 nucleotides in length, and in certain of these embodiments the 3′ subdomain is 3, 4, 5, 6, 7, 8, 9, 10, 11, 12, 13, 14, 15, 16, 17, 18, 19, 20, 21, 22, 23, 24, or 25 nucleotides in length. In certain embodiments, the 3′ subdomain of the second complementarity domain is 4 to 9, e.g., 4, 5, 6, 7, 8 or 9 nucleotides in length.

[0279] The first and/or second complementarity domains can share homology with, or be derived from, naturally occurring or reference first and/or second complementarity domain. In certain of these embodiments, the first and/or second complementarity domains have at least 50%, 60%, 70%, 80%, 85%, 90%, or 95% homology with, or differ by no more than 1, 2, 3, 4, 5, or 6 nucleotides from, the naturally occurring or reference first and/or second complementarity domain. In certain of these embodiments, the first and/or second complementarity domains may have at least 50%, 60%, 70%, 80%, 85%, 90%, or 95% homology with homology with a first and/or second complementarity domain from S. pyogenes or S. aureus.

[0280] In certain embodiments, the first and/or second complementarity domains do not comprise any modifications. In other embodiments, the first and/or second complementarity domains or one or more nucleotides therein have a modification, including but not limited to a modification set forth below. In certain embodiments, one or more nucleotides of the first and/or second complementarity domain may comprise a 2′ modification (e.g., a modification at the 2′ position on ribose), e.g., a 2-acetylation, e.g., a 2′ methylation. In certain embodiments, the backbone of the targeting domain can be modified with a phosphorothioate. In certain embodiments, modifications to one or more nucleotides of the first and/or second complementarity domain render the first and/or second complementarity domain and/or the gRNA comprising the first and/or second complementarity less susceptible to degradation or more bio-compatible, e.g., less immunogenic. In certain embodiments, the first and/or second complementarity domains each independently include 1, 2, 3, 4, 5, 6, 7, or 8 or more modifications, and in certain of these embodiments the first and/or second complementarity domains each independently include 1, 2, 3, or 4 modifications within five nucleotides of their respective 5′ ends, 3′ ends, or both their 5′ and 3′ ends. In other embodiments, the first and/or second complementarity domains each independently contain no modifications within five nucleotides of their respective 5′ ends, 3′ ends, or both their 5′ and 3′ ends. In certain embodiments, one or both of the first and second complementarity domains comprise modifications at two or more consecutive nucleotides.

[0281] In certain embodiments, modifications to one or more nucleotides in the first and/or second complementarity domains are selected to not interfere with targeting efficacy, which can be evaluated by testing a candidate modification in a system as set forth below. gRNAs having a candidate first or second complementarity domain having a selected length, sequence, degree of complementarity, or degree of modification can be evaluated in a system as set forth below. The candidate complementarity domain can be placed, either alone or with one or more other candidate changes in a gRNA molecule/Cas9 molecule system known to be functional with a selected target, and evaluated.

[0282] In certain embodiments, the duplexed region formed by the first and second complementarity domains is, for example, 6, 7, 8, 9, 10, 11, 12, 13, 14, 15, 16, 17, 18, 19, 20, 21, or 22 bp in length, excluding any looped out or unpaired nucleotides.

[0283] In certain embodiments, the first and second complementarity domains, when duplexed, comprise 11 paired nucleotides (see, for e.g., gRNA of SEQ ID NO:5). In certain embodiments, the first and second complementarity domains, when duplexed, comprise 15 paired nucleotides (see, e.g., gRNA of SEQ ID NO:27). In certain embodiments, the first and second complementarity domains, when duplexed, comprise 16 paired nucleotides (see, e.g., gRNA of SEQ ID NO:28). In certain embodiments, the first and second complementarity domains, when duplexed, comprise 21 paired nucleotides (see, e.g., gRNA of SEQ ID NO:29).

[0284] In certain embodiments, one or more nucleotides are exchanged between the first and second complementarity domains to remove poly-U tracts. For example, nucleotides 23 and 48 or nucleotides 26 and 45 of the gRNA of SEQ ID NO:5 may be exchanged to generate the gRNA of SEQ ID NOs:30 or 31, respectively. Similarly, nucleotides 23 and 39 of the gRNA of SEQ ID NO:29 may be exchanged with nucleotides 50 and 68 to generate the gRNA of SEQ ID NO:32.

[0285] Linking Domain

[0286] The linking domain is disposed between and serves to link the first and second complementarity domains in a unimolecular or chimeric gRNA. In certain embodiments, part of the linking domain is from a crRNA-derived region, and another part is from a tracrRNA-derived region.

[0287] In certain embodiments, the linking domain links the first and second complementarity domains covalently. In certain of these embodiments, the linking domain consists of or comprises a covalent bond. In other embodiments, the linking domain links the first and second complementarity domains non-covalently. In certain embodiments, the linking domain is ten or fewer nucleotides in length, e.g., 1, 2, 3, 4, 5, 6, 7, 8, 9, or 10 nucleotides. In other embodiments, the linking domain is greater than 10 nucleotides in length, e.g., 11, 12, 13, 14, 15, 16, 17, 18, 19, 20, 21, 22, 23, 24, or 25 or more nucleotides. In certain embodiments, the linking domain is 2 to 50, 2 to 40, 2 to 30, 2 to 20, 2 to 10, 2 to 5, 10 to 100, 10 to 90, 10 to 80, 10 to 70, 10 to 60, 10 to 50, 10 to 40, 10 to 30, 10 to 20, 10 to 15, 20 to 100, 20 to 90, 20 to 80, 20 to 70, 20 to 60, 20 to 50, 20 to 40, 20 to 30, or 20 to 25 nucleotides in length. In certain embodiments, the linking domain is 10+/−5, 20+/−5, 20+/−10, 30+/−5, 30+/−10, 40+/−5, 40+/−10, 50+/−5, 50+/−10, 60+/−5, 60+/−10, 70+/−5, 70+/−10, 80+/−5, 80+/−10, 90+/−5, 90+/−10, 100+/−5, or 100+/−10 nucleotides in length.

[0288] In certain embodiments, the linking domain shares homology with, or is derived from, a naturally occurring sequence, e.g., the sequence of a tracrRNA that is 5′ to the second complementarity domain. In certain embodiments, the linking domain has at least 50%, 60%, 70%, 80%, 90%, or 95% homology with or differs by no more than 1, 2, 3, 4, 5, or 6 nucleotides from a linking domain disclosed herein.

[0289] In certain embodiments, the linking domain does not comprise any modifications. In other embodiments, the linking domain or one or more nucleotides therein have a modification, including but not limited to the modifications set forth below. In certain embodiments, one or more nucleotides of the linking domain may comprise a 2′ modification (e.g., a modification at the 2′ position on ribose), e.g., a 2-acetylation, e.g., a 2′ methylation. In certain embodiments, the backbone of the linking domain can be modified with a phosphorothioate. In certain embodiments, modifications to one or more nucleotides of the linking domain render the linking domain and/or the gRNA comprising the linking domain less susceptible to degradation or more bio-compatible, e.g., less immunogenic. In certain embodiments, the linking domain includes 1, 2, 3, 4, 5, 6, 7, or 8 or more modifications, and in certain of these embodiments the linking domain includes 1, 2, 3, or 4 modifications within five nucleotides of its 5′ and/or 3′ end. In certain embodiments, the linking domain comprises modifications at two or more consecutive nucleotides.

[0290] In certain embodiments, modifications to one or more nucleotides in the linking domain are selected to not interfere with targeting efficacy, which can be evaluated by testing a candidate modification in a system as set forth below. gRNAs having a candidate linking domain having a selected length, sequence, degree of complementarity, or degree of modification can be evaluated in a system as set forth below. The candidate linking domain can be placed, either alone or with one or more other candidate changes in a gRNA molecule/Cas9 molecule system known to be functional with a selected target, and evaluated.

[0291] In certain embodiments, the linking domain comprises a duplexed region, typically adjacent to or within 1, 2, or 3 nucleotides of the 3′ end of the first complementarity domain and/or the 5′ end of the second complementarity domain. In certain of these embodiments, the duplexed region of the linking region is 10+/−5, 15+/−5, 20+/−5, 20+/−10, or 30+/−5 bp in length. In certain embodiments, the duplexed region of the linking domain is 1, 2, 3, 4, 5, 6, 7, 8, 9, 10, 11, 12, 13, 14, or 15 bp in length. In certain embodiments, the sequences forming the duplexed region of the linking domain are fully complementarity. In other embodiments, one or both of the sequences forming the duplexed region contain one or more nucleotides (e.g., 1, 2, 3, 4, 5, 6, 7, or 8 nucleotides) that are not complementary with the other duplex sequence.

[0292] 5′ Extension Domain

[0293] In certain embodiments, a modular gRNA as disclosed herein comprises a 5′ extension domain, i.e., one or more additional nucleotides 5′ to the second complementarity domain. In certain embodiments, the 5′ extension domain is 2 to 10 or more, 2 to 9, 2 to 8, 2 to 7, 2 to 6, 2 to 5, or 2 to 4 nucleotides in length, and in certain of these embodiments the 5′ extension domain is 2, 3, 4, 5, 6, 7, 8, 9, or 10 or more nucleotides in length.

[0294] In certain embodiments, the 5′ extension domain nucleotides do not comprise modifications, e.g., modifications of the type provided below. However, in certain embodiments, the 5′ extension domain comprises one or more modifications, e.g., modifications that it render it less susceptible to degradation or more bio-compatible, e.g., less immunogenic. By way of example, the backbone of the 5′ extension domain can be modified with a phosphorothioate, or other modification(s) as set forth below. In certain embodiments, a nucleotide of the 5′ extension domain can comprise a 2′ modification (e.g., a modification at the 2′ position on ribose), e.g., a 2-acetylation, e.g., a 2′ methylation, or other modification(s) as set forth below.

[0295] In certain embodiments, the 5′ extension domain can comprise as many as 1, 2, 3, 4, 5, 6, 7, or 8 modifications. In certain embodiments, the 5′ extension domain comprises as many as 1, 2, 3, or 4 modifications within 5 nucleotides of its 5′ end, e.g., in a modular gRNA molecule. In certain embodiments, the 5′ extension domain comprises as many as 1, 2, 3, or 4 modifications within 5 nucleotides of its 3′ end, e.g., in a modular gRNA molecule.

[0296] In certain embodiments, the 5′ extension domain comprises modifications at two consecutive nucleotides, e.g., two consecutive nucleotides that are within 5 nucleotides of the 5′ end of the 5′ extension domain, within 5 nucleotides of the 3′ end of the 5′ extension domain, or more than 5 nucleotides away from one or both ends of the 5′ extension domain. In certain embodiments, no two consecutive nucleotides are modified within 5 nucleotides of the 5′ end of the 5′ extension domain, within 5 nucleotides of the 3′ end of the 5′ extension domain, or within a region that is more than 5 nucleotides away from one or both ends of the 5′ extension domain. In certain embodiments, no nucleotide is modified within 5 nucleotides of the 5′ end of the 5′ extension domain, within 5 nucleotides of the 3′ end of the 5′ extension domain, or within a region that is more than 5 nucleotides away from one or both ends of the 5′ extension domain.

[0297] Modifications in the 5′ extension domain can be selected so as to not interfere with gRNA molecule efficacy, which can be evaluated by testing a candidate modification in a system as set forth below. gRNAs having a candidate 5′ extension domain having a selected length, sequence, degree of complementarity, or degree of modification, can be evaluated in a system as set forth below. The candidate 5′ extension domain can be placed, either alone, or with one or more other candidate changes in a gRNA molecule/Cas9 molecule system known to be functional with a selected target and evaluated.

[0298] In certain embodiments, the 5′ extension domain has at least 60, 70, 80, 85, 90, or 95% homology with, or differs by no more than 1, 2, 3, 4, 5, or 6 nucleotides from, a reference 5′ extension domain, e.g., a naturally occurring, e.g., an S. pyogenes, S. aureus, or S. thermophilus, 5′ extension domain, or a 5′ extension domain described herein.

[0299] Proximal Domain

[0300] In certain embodiments, the proximal domain is 5 to 20 or more nucleotides in length, e.g., 5, 6, 7, 8, 9, 10, 11, 12, 13, 14, 15, 16, 17, 18, 19, 20, 21, 22, 23, 24, 25, or 26 nucleotides in length. In certain of these embodiments, the proximal domain is 6+/−2, 7+/−2, 8+/−2, 9+/−2, 10+/−2, 11+/−2, 12+/−2, 13+/−2, 14+/−2, 14+/−2, 16+/−2, 17+/−2, 18+/−2, 19+/−2, or 20+/−2 nucleotides in length. In certain embodiments, the proximal domain is 5 to 20, 7, to 18, 9 to 16, or 10 to 14 nucleotides in length.

[0301] In certain embodiments, the proximal domain can share homology with or be derived from a naturally occurring proximal domain. In certain of these embodiments, the proximal domain has at least 50%, 60%, 70%, 80%, 85%, 90%, or 95% homology with or differs by no more than 1, 2, 3, 4, 5, or 6 nucleotides from a proximal domain disclosed herein, e.g., an S. pyogenes, S. aureus, or S. thermophilus proximal domain.

[0302] In certain embodiments, the proximal domain does not comprise any modifications. In other embodiments, the proximal domain or one or more nucleotides therein have a modification, including but not limited to the modifications set forth in herein. In certain embodiments, one or more nucleotides of the proximal domain may comprise a 2′ modification (e.g., a modification at the 2′ position on ribose), e.g., a 2-acetylation, e.g., a 2′ methylation. In certain embodiments, the backbone of the proximal domain can be modified with a phosphorothioate. In certain embodiments, modifications to one or more nucleotides of the proximal domain render the proximal domain and/or the gRNA comprising the proximal domain less susceptible to degradation or more bio-compatible, e.g., less immunogenic. In certain embodiments, the proximal domain includes 1, 2, 3, 4, 5, 6, 7, or 8 or more modifications, and in certain of these embodiments the proximal domain includes 1, 2, 3, or 4 modifications within five nucleotides of its 5′ and/or 3′ end. In certain embodiments, the proximal domain comprises modifications at two or more consecutive nucleotides.

[0303] In certain embodiments, modifications to one or more nucleotides in the proximal domain are selected to not interfere with targeting efficacy, which can be evaluated by testing a candidate modification in a system as set forth below. gRNAs having a candidate proximal domain having a selected length, sequence, degree of complementarity, or degree of modification can be evaluated in a system as set forth below. The candidate proximal domain can be placed, either alone or with one or more other candidate changes in a gRNA molecule/Cas9 molecule system known to be functional with a selected target, and evaluated.

[0304] Tail Domain

[0305] A broad spectrum of tail domains are suitable for use in the gRNA molecules disclosed herein.

[0306] In certain embodiments, the tail domain is absent. In other embodiments, the tail domain is 1 to 100 or more nucleotides in length, e.g., 1, 2, 3, 4, 5, 6, 7, 8, 9, 10, 20, 30, 40, 50, 60, 70, 80, 90, or 100 nucleotides in length. In certain embodiments, the tail domain is 1 to 5, 1 to 10, 1 to 15, 1 to 20, 1 to 50, 10 to 100, 20 to 100, 10 to 90, 20 to 90, 10 to 80, 20 to 80, 10 to 70, 20 to 70, 10 to 60, 20 to 60, 10 to 50, 20 to 50, 10 to 40, 20 to 40, 10 to 30, 20 to 30, 20 to 25, 10 to 20, or 10 to 15 nucleotides in length. In certain embodiments, the tail domain is 5+/−5, 10+/−5, 20+/−10, 20+/−5, 25+/−10, 30+/−10, 30+/−5, 40+/−10, 40+/−5, 50+/−10, 50+/−5, 60+/−10, 60+/−5, 70+/−10, 70+/−5, 80+/−10, 80+/−5, 90+/−10, 90+/−5, 100+/−10, or 100+/−5 nucleotides in length,

[0307] In certain embodiments, the tail domain can share homology with or be derived from a naturally occurring tail domain or the 5′ end of a naturally occurring tail domain. In certain of these embodiments, the proximal domain has at least 50%, 60%, 70%, 80%, 85%, 90%, or 95% homology with or differs by no more than 1, 2, 3, 4, 5, or 6 nucleotides from a naturally occurring tail domain disclosed herein, e.g., an S. pyogenes, S. aureus, or S. thermophilus tail domain.

[0308] In certain embodiments, the tail domain includes sequences that are complementary to each other and which, under at least some physiological conditions, form a duplexed region. In certain of these embodiments, the tail domain comprises a tail duplex domain which can form a tail duplexed region. In certain embodiments, the tail duplexed region is 3, 4, 5, 6, 7, 8, 9, 10, 11, or 12 bp in length. In certain embodiments, the tail domain comprises a single stranded domain 3′ to the tail duplex domain that does not form a duplex. In certain of these embodiments, the single stranded domain is 3 to 10 nucleotides in length, e.g., 3, 4, 5, 6, 7, 8, 9, 10, or 4 to 6 nucleotides in length.

[0309] In certain embodiments, the tail domain does not comprise any modifications. In other embodiments, the tail domain or one or more nucleotides therein have a modification, including but not limited to the modifications set forth herein. In certain embodiments, one or more nucleotides of the tail domain may comprise a 2′ modification (e.g., a modification at the 2′ position on ribose), e.g., a 2-acetylation, e.g., a 2′ methylation. In certain embodiments, the backbone of the tail domain can be modified with a phosphorothioate. In certain embodiments, modifications to one or more nucleotides of the tail domain render the tail domain and/or the gRNA comprising the tail domain less susceptible to degradation or more bio-compatible, e.g., less immunogenic. In certain embodiments, the tail domain includes 1, 2, 3, 4, 5, 6, 7, or 8 or more modifications, and in certain of these embodiments the tail domain includes 1, 2, 3, or 4 modifications within five nucleotides of its 5′ and/or 3′ end. In certain embodiments, the tail domain comprises modifications at two or more consecutive nucleotides.

[0310] In certain embodiments, modifications to one or more nucleotides in the tail domain are selected to not interfere with targeting efficacy, which can be evaluated by testing a candidate modification as set forth below. gRNAs having a candidate tail domain having a selected length, sequence, degree of complementarity, or degree of modification can be evaluated using a system as set forth below. The candidate tail domain can be placed, either alone or with one or more other candidate changes in a gRNA molecule/Cas9 molecule system known to be functional with a selected target, and evaluated.

[0311] In certain embodiments, the tail domain includes nucleotides at the 3′ end that are related to the method of in vitro or in vivo transcription. When a T7 promoter is used for in vitro transcription of the gRNA, these nucleotides may be any nucleotides present before the 3′ end of the DNA template. When a U6 promoter is used for in vivo transcription, these nucleotides may be the sequence UUUUUU. When an H1 promoter is used for transcription, these nucleotides may be the sequence UUUU. When alternate pol-III promoters are used, these nucleotides may be various numbers of uracil bases depending on, e.g., the termination signal of the pol-III promoter, or they may include alternate bases.

[0312] In certain embodiments, the proximal and tail domain taken together comprise, consist of, or consist essentially of the sequence set forth in SEQ ID NOs: 33, 34, 35, 36, or 38.

[0313] Exemplary Unimolecular/Chimeric gRNAs

[0314] In certain embodiments, a gRNA as disclosed herein has the structure: 5′ [targeting domain]-[first complementarity domain]-[linking domain]-[second complementarity domain]-[proximal domain]-[tail domain]-3′, wherein:

[0315] the targeting domain comprises a core domain and optionally a secondary domain, and is 10 to 50 nucleotides in length;

[0316] the first complementarity domain is 5 to 25 nucleotides in length and, in certain embodiments has at least 50, 60, 70, 80, 85, 90, or 95% homology with a reference first complementarity domain disclosed herein;

[0317] the linking domain is 1 to 5 nucleotides in length;

[0318] the second complementarity domain is 5 to 27 nucleotides in length and, in certain embodiments has at least 50, 60, 70, 80, 85, 90, or 95% homology with a reference second complementarity domain disclosed herein;

[0319] the proximal domain is 5 to 20 nucleotides in length and, in certain embodiments has at least 50, 60, 70, 80, 85, 90, or 95% homology with a reference proximal domain disclosed herein; and

[0320] the tail domain is absent or a nucleotide sequence is 1 to 50 nucleotides in length and, in certain embodiments has at least 50, 60, 70, 80, 85, 90, or 95% homology with a reference tail domain disclosed herein.

[0321] In certain embodiments, a unimolecular gRNA as disclosed herein comprises, preferably from 5′ to 3′:
[0322] a targeting domain, e.g., comprising 10-50 nucleotides;
[0323] a first complementarity domain, e.g., comprising 15, 16, 17, 18, 19, 20, 21, 22, 23, 24, 25, or 26 nucleotides;
[0324] a linking domain;
[0325] a second complementarity domain;
[0326] a proximal domain; and
[0327] a tail domain,

[0328] wherein,
[0329] (a) the proximal and tail domain, when taken together, comprise at least 15, 18, 20, 25, 30, 31, 35, 40, 45, 49, 50, or 53 nucleotides;
[0330] (b) there are at least 15, 18, 20, 25, 30, 31, 35, 40, 45, 49, 50, or 53 nucleotides 3′ to the last nucleotide of the second complementarity domain; or
[0331] (c) there are at least 16, 19, 21, 26, 31, 32, 36, 41, 46, 50, 51, or 54 nucleotides 3′ to the last nucleotide of the second complementarity domain that is complementary to its corresponding nucleotide of the first complementarity domain.

[0332] In certain embodiments, the sequence from (a), (b), and/or (c) has at least 50%, 60%, 70%, 75%, 80%, 85%, 90%, 95%, or 99% homology with the corresponding sequence of a naturally occurring gRNA, or with a gRNA described herein.

[0333] In certain embodiments, the proximal and tail domain, when taken together, comprise at least 15, 18, 20, 25, 30, 31, 35, 40, 45, 49, 50, or 53 nucleotides.

[0334] In certain embodiments, there are at least 15, 18, 20, 25, 30, 31, 35, 40, 45, 49, 50, or 53 nucleotides 3′ to the last nucleotide of the second complementarity domain.

[0335] In certain embodiments, there are at least 16, 19, 21, 26, 31, 32, 36, 41, 46, 50, 51, or 54 nucleotides 3′ to the last nucleotide of the second complementarity domain that are complementary to the corresponding nucleotides of the first complementarity domain.

[0336] In certain embodiments, the targeting domain consists of, consists essentially of, or comprises 16, 17, 18, 19, 20, 21, 22, 23, 24, 25, or 26 nucleotides (e.g., 16, 17, 18, 19, 20, 21, 22, 23, 24, 25, or 26 consecutive nucleotides) complementary or partially complementary to the target domain or a portion thereof, e.g., the targeting domain is 16, 17, 18, 19, 20, 21, 22, 23, 24, 25, or 26 nucleotides in length. In certain of these embodiments, the targeting domain is complementary to the target domain over the entire length of the targeting domain, the entire length of the target domain, or both.

[0337] In certain embodiments, a unimolecular or chimeric gRNA molecule disclosed herein (comprising a targeting domain, a first complementary domain, a linking domain, a second complementary domain, a proximal domain and, optionally, a tail domain) comprises the amino acid sequence set forth in SEQ ID NO:45, wherein the targeting domain is listed as 20 N's (residues 1-20) but may range in length from 16 to 26 nucleotides, and wherein the final six residues (residues 97-102) represent a termination signal for the U6 promoter buy may be absent or fewer in number. In certain embodiments, the unimolecular, or chimeric, gRNA molecule is a S. pyogenes gRNA molecule.

[0338] In certain embodiments, a unimolecular or chimeric gRNA molecule disclosed herein (comprising a targeting domain, a first complementary domain, a linking domain, a second complementary domain, a proximal domain and, optionally, a tail domain) comprises the amino acid sequence set forth in SEQ ID NO:40, wherein the targeting domain is listed as 20 Ns (residues 1-20) but may range in length from 16 to 26 nucleotides, and wherein the final six residues (residues 97-102) represent a termination signal for the U6 promoter but may be absent or fewer in number. In certain embodiments, the unimolecular or chimeric gRNA molecule is an S. aureus gRNA molecule.

[0339] Exemplary Modular gRNAs

[0340] In certain embodiments, a modular gRNA disclosed herein comprises:
[0341] a first strand comprising, preferably from 5′ to 3′;
   [0342] a targeting domain, e.g., comprising 15, 16, 17, 18, 19, 20, 21, 22, 23, 24, 25, or 26 nucleotides;
   [0343] a first complementarity domain; and
[0344] a second strand, comprising, preferably from 5′ to 3′:
   [0345] optionally a 5′ extension domain;
   [0346] a second complementarity domain;
   [0347] a proximal domain; and
   [0348] a tail domain,

[0349] wherein:
[0350] (a) the proximal and tail domain, when taken together, comprise at least 15, 18, 20, 25, 30, 31, 35, 40, 45, 49, 50, or 53 nucleotides;
[0351] (b) there are at least 15, 18, 20, 25, 30, 31, 35, 40, 45, 49, 50, or 53 nucleotides 3′ to the last nucleotide of the second complementarity domain; or
[0352] (c) there are at least 16, 19, 21, 26, 31, 32, 36, 41, 46, 50, 51, or 54 nucleotides 3′ to the last nucleotide of the second complementarity domain that is complementary to its corresponding nucleotide of the first complementarity domain.

[0353] In certain embodiments, the sequence from (a), (b), or (c), has at least 60, 75, 80, 85, 90, 95, or 99% homology with the corresponding sequence of a naturally occurring gRNA, or with a gRNA described herein.

[0354] In certain embodiments, the proximal and tail domain, when taken together, comprise at least 15, 18, 20, 25, 30, 31, 35, 40, 45, 49, 50, or 53 nucleotides.

[0355] In certain embodiments, there are at least 15, 18, 20, 25, 30, 31, 35, 40, 45, 49, 50, or 53 nucleotides 3′ to the last nucleotide of the second complementarity domain.

[0356] In certain embodiments, there are at least 16, 19, 21, 26, 31, 32, 36, 41, 46, 50, 51, or 54 nucleotides 3′ to the last nucleotide of the second complementarity domain that is complementary to its corresponding nucleotide of the first complementarity domain.

[0357] In certain embodiments, the targeting domain comprises, has, or consists of, 16, 17, 18, 19, 20, 21, 22, 23, 24, 25, or 26 nucleotides (e.g., 16, 17, 18, 19, 20, 21, 22, 23, 24, 25, or 26 consecutive nucleotides) having complementarity with the target domain, e.g., the targeting domain is 16, 17, 18, 19, 20, 21, 22, 23, 24, 25, or 26 nucleotides in length.

[0358] In certain embodiments, the targeting domain consists of, consists essentially of, or comprises 16, 17, 18, 19, 20, 21, 22, 23, 24, 25, or 26 nucleotides (e.g., 16, 17, 18, 19, 20, 21, 22, 23, 24, 25, or 26 consecutive nucleotides) complementary to the target domain or a portion thereof. In certain of these embodiments, the targeting domain is complementary to the target domain over the entire length of the targeting domain, the entire length of the target domain, or both.

[0359] In certain embodiments, the targeting domain comprises, has, or consists of, 16 nucleotides (e.g., 16 consecutive nucleotides) having complementarity with the target domain, e.g., the targeting domain is 16 nucleotides in length; and the proximal and tail domain, when taken together, comprise at least 15, 18, 20, 25, 30, 31, 35, 40, 45, 49, 50, or 53 nucleotides.

[0360] In certain embodiments, the targeting domain comprises, has, or consists of, 16 nucleotides (e.g., 16 consecutive nucleotides) having complementarity with the target domain, e.g., the targeting domain is 16 nucleotides in length; and there are at least 15, 18, 20, 25, 30, 31, 35, 40, 45, 49, 50, or 53 nucleotides 3′ to the last nucleotide of the second complementarity domain.

[0361] In certain embodiments, the targeting domain comprises, has, or consists of, 16 nucleotides (e.g., 16 consecutive nucleotides) having complementarity with the target domain, e.g., the targeting domain is 16 nucleotides in length; and there are at least 16, 19, 21, 26, 31, 32, 36, 41, 46, 50, 51, or 54 nucleotides 3′ to the last nucleotide of the second complementarity domain that is complementary to its corresponding nucleotide of the first complementarity domain.

[0362] In certain embodiments, the targeting domain has, or consists of, 17 nucleotides (e.g., 17 consecutive nucleotides) having complementarity with the target domain, e.g., the targeting domain is 17 nucleotides in length; and the proximal and tail domain, when taken together, comprise at least 15, 18, 20, 25, 30, 31, 35, 40, 45, 49, 50, or 53 nucleotides.

[0363] In certain embodiments, the targeting domain has, or consists of, 17 nucleotides (e.g., 17 consecutive nucleotides) having complementarity with the target domain, e.g., the targeting domain is 17 nucleotides in length; and there are at least 15, 18, 20, 25, 30, 31, 35, 40, 45, 49, 50, or 53 nucleotides 3′ to the last nucleotide of the second complementarity domain.

[0364] In certain embodiments, the targeting domain has, or consists of, 17 nucleotides (e.g., 17 consecutive nucleotides) having complementarity with the target domain, e.g., the targeting domain is 17 nucleotides in length; and there are at least 16, 19, 21, 26, 31, 32, 36, 41, 46, 50, 51, or 54 nucleotides 3′ to the last nucleotide of the second complementarity domain that is complementary to its corresponding nucleotide of the first complementarity domain.

[0365] In certain embodiments, the targeting domain has, or consists of, 18 nucleotides (e.g., 18 consecutive nucleotides) having complementarity with the target domain, e.g., the targeting domain is 18 nucleotides in length; and the proximal and tail domain, when taken together, comprise at least 15, 18, 20, 25, 30, 31, 35, 40, 45, 49, 50, or 53 nucleotides.

[0366] In certain embodiments, the targeting domain has, or consists of, 18 nucleotides (e.g., 18 consecutive nucleotides) having complementarity with the target domain, e.g., the targeting domain is 18 nucleotides in length; and there are at least 15, 18, 20, 25, 30, 31, 35, 40, 45, 49, 50, or 53 nucleotides 3′ to the last nucleotide of the second complementarity domain.

[0367] In certain embodiments, the targeting domain has, or consists of, 18 nucleotides (e.g., 18 consecutive nucleotides) having complementarity with the target domain, e.g., the targeting domain is 18 nucleotides in length; and there are at least 16, 19, 21, 26, 31, 32, 36, 41, 46, 50, 51, or 54 nucleotides 3′ to the last nucleotide of the second complementarity domain that is complementary to its corresponding nucleotide of the first complementarity domain.

[0368] In certain embodiments, the targeting domain comprises, has, or consists of, 19 nucleotides (e.g., 19 consecutive nucleotides) having complementarity with the target domain, e.g., the targeting domain is 19 nucleotides in length; and the proximal and tail domain, when taken together, comprise at least 15, 18, 20, 25, 30, 31, 35, 40, 45, 49, 50, or 53 nucleotides.

[0369] In certain embodiments, the targeting domain comprises, has, or consists of, 19 nucleotides (e.g., 19 consecutive nucleotides) having complementarity with the target domain, e.g., the targeting domain is 19 nucleotides in length; and there are at least 15, 18, 20, 25, 30, 31, 35, 40, 45, 49, 50, or 53 nucleotides 3′ to the last nucleotide of the second complementarity domain.

[0370] In certain embodiments, the targeting domain comprises, has, or consists of, 19 nucleotides (e.g., 19 consecutive nucleotides) having complementarity with the target domain, e.g., the targeting domain is 19 nucleotides in length; and there are at least 16, 19, 21, 26, 31, 32, 36, 41, 46, 50, 51, or 54 nucleotides 3′ to the last nucleotide of the second complementarity domain that is complementary to its corresponding nucleotide of the first complementarity domain.

[0371] In certain embodiments, the targeting domain comprises, has, or consists of, 20 nucleotides (e.g., 20 consecutive nucleotides) having complementarity with the target domain, e.g., the targeting domain is 20 nucleotides in length; and the proximal and tail domain, when taken together, comprise at least 15, 18, 20, 25, 30, 31, 35, 40, 45, 49, 50, or 53 nucleotides.

[0372] In certain embodiments, the targeting domain comprises, has, or consists of, 20 nucleotides (e.g., 20 consecutive nucleotides) having complementarity with the target domain, e.g., the targeting domain is 20 nucleotides in length; and there are at least 15, 18, 20, 25, 30, 31, 35, 40, 45, 49, 50, or 53 nucleotides 3′ to the last nucleotide of the second complementarity domain.

[0373] In certain embodiments, the targeting domain comprises, has, or consists of, 20 nucleotides (e.g., 20 consecutive nucleotides) having complementarity with the target domain, e.g., the targeting domain is 20 nucleotides in length; and there are at least 16, 19, 21, 26, 31, 32, 36, 41, 46, 50, 51, or 54 nucleotides 3′ to the last nucleotide of the second complementarity domain that is complementary to its corresponding nucleotide of the first complementarity domain.

[0374] In certain embodiments, the targeting domain comprises, has, or consists of, 21 nucleotides (e.g., 21 consecutive nucleotides) having complementarity with the target domain, e.g., the targeting domain is 21 nucleotides in length; and the proximal and tail domain, when taken together, comprise at least 15, 18, 20, 25, 30, 31, 35, 40, 45, 49, 50, or 53 nucleotides.

[0375] In certain embodiments, the targeting domain comprises, has, or consists of, 21 nucleotides (e.g., 21 consecutive nucleotides) having complementarity with the target domain, e.g., the targeting domain is 21 nucleotides in length; and there are at least 15, 18, 20, 25, 30, 31, 35, 40, 45, 49, 50, or 53 nucleotides 3′ to the last nucleotide of the second complementarity domain.

[0376] In certain embodiments, the targeting domain comprises, has, or consists of, 21 nucleotides (e.g., 21 consecutive nucleotides) having complementarity with the target domain, e.g., the targeting domain is 21 nucleotides in length; and there are at least 16, 19, 21, 26, 31, 32, 36, 41, 46, 50, 51, or 54 nucleotides 3′ to the last nucleotide of the second complementarity domain that is complementary to its corresponding nucleotide of the first complementarity domain.

[0377] In certain embodiments, the targeting domain comprises, has, or consists of, 22 nucleotides (e.g., 22 consecutive nucleotides) having complementarity with the target domain, e.g., the targeting domain is 22 nucleotides in length; and the proximal and tail domain, when taken together, comprise at least 15, 18, 20, 25, 30, 31, 35, 40, 45, 49, 50, or 53 nucleotides.

[0378] In certain embodiments, the targeting domain comprises, has, or consists of, 22 nucleotides (e.g., 22 consecutive nucleotides) having complementarity with the target domain, e.g., the targeting domain is 22 nucleotides in length; and there are at least 15, 18, 20, 25, 30, 31, 35, 40, 45, 49, 50, or 53 nucleotides 3′ to the last nucleotide of the second complementarity domain.

[0379] In certain embodiments, the targeting domain comprises, has, or consists of, 22 nucleotides (e.g., 22 consecutive nucleotides) having complementarity with the target domain, e.g., the targeting domain is 22 nucleotides in length; and there are at least 16, 19, 21, 26, 31, 32, 36, 41, 46, 50, 51, or 54 nucleotides 3′ to the last nucleotide of the second complementarity domain that is complementary to its corresponding nucleotide of the first complementarity domain.

[0380] In certain embodiments, the targeting domain comprises, has, or consists of, 23 nucleotides (e.g., 23 consecutive nucleotides) having complementarity with the target domain, e.g., the targeting domain is 23 nucleotides in length; and the proximal and tail domain, when taken together, comprise at least 15, 18, 20, 25, 30, 31, 35, 40, 45, 49, 50, or 53 nucleotides.

[0381] In certain embodiments, the targeting domain comprises, has, or consists of, 23 nucleotides (e.g., 23 consecutive nucleotides) having complementarity with the target domain, e.g., the targeting domain is 23 nucleotides in length; and there are at least 15, 18, 20, 25, 30, 31, 35, 40, 45, 49, 50, or 53 nucleotides 3′ to the last nucleotide of the second complementarity domain.

[0382] In certain embodiments, the targeting domain comprises, has, or consists of, 23 nucleotides (e.g., 23 consecutive nucleotides) having complementarity with the target domain, e.g., the targeting domain is 23 nucleotides in length; and there are at least 16, 19, 21, 26, 31, 32, 36, 41, 46, 50, 51, or 54 nucleotides 3′ to the last nucleotide of the second complementarity domain that is complementary to its corresponding nucleotide of the first complementarity domain.

[0383] In certain embodiments, the targeting domain comprises, has, or consists of, 24 nucleotides (e.g., 24 consecutive nucleotides) having complementarity with the target domain, e.g., the targeting domain is 24 nucleotides in length; and the proximal and tail domain, when taken together, comprise at least 15, 18, 20, 25, 30, 31, 35, 40, 45, 49, 50, or 53 nucleotides.

[0384] In certain embodiments, the targeting domain comprises, has, or consists of, 24 nucleotides (e.g., 24 consecutive nucleotides) having complementarity with the target domain, e.g., the targeting domain is 24 nucleotides in length; and there are at least 15, 18, 20, 25, 30, 31, 35, 40, 45, 49, 50, or 53 nucleotides 3′ to the last nucleotide of the second complementarity domain.

[0385] In certain embodiments, the targeting domain comprises, has, or consists of, 24 nucleotides (e.g., 24 consecutive nucleotides) having complementarity with the target domain, e.g., the targeting domain is 24 nucleotides in length; and there are at least 16, 19, 21, 26, 31, 32, 36, 41, 46, 50, 51, or 54 nucleotides 3′ to the last nucleotide of the second complementarity domain that is complementary to its corresponding nucleotide of the first complementarity domain.

[0386] In certain embodiments, the targeting domain comprises, has, or consists of, 25 nucleotides (e.g., 25 consecutive nucleotides) having complementarity with the target domain, e.g., the targeting domain is 25 nucleotides in length; and the proximal and tail domain, when taken together, comprise at least 15, 18, 20, 25, 30, 31, 35, 40, 45, 49, 50, or 53 nucleotides.

[0387] In certain embodiments, the targeting domain comprises, has, or consists of, 25 nucleotides (e.g., 25 consecutive nucleotides) having complementarity with the target domain, e.g., the targeting domain is 25 nucleotides in length; and there are at least 15, 18, 20, 25, 30, 31, 35, 40, 45, 49, 50, or 53 nucleotides 3′ to the last nucleotide of the second complementarity domain.

[0388] In certain embodiments, the targeting domain comprises, has, or consists of, 25 nucleotides (e.g., 25 consecutive nucleotides) having complementarity with the target domain, e.g., the targeting domain is 25 nucleotides in length; and there are at least 16, 19, 21, 26, 31, 32, 36, 41, 46, 50, 51, or 54 nucleotides 3′ to the last nucleotide of the second complementarity domain that is complementary to its corresponding nucleotide of the first complementarity domain.

[0389] In certain embodiments, the targeting domain comprises, has, or consists of, 26 nucleotides (e.g., 26 consecutive nucleotides) having complementarity with the target domain, e.g., the targeting domain is 26 nucleotides in length; and the proximal and tail domain, when taken together, comprise at least 15, 18, 20, 25, 30, 31, 35, 40, 45, 49, 50, or 53 nucleotides.

[0390] In certain embodiments, the targeting domain comprises, has, or consists of, 26 nucleotides (e.g., 26 consecutive nucleotides) having complementarity with the target domain, e.g., the targeting domain is 26 nucleotides in length; and there are at least 15, 18, 20, 25, 30, 31, 35, 40, 45, 49, 50, or 53 nucleotides 3′ to the last nucleotide of the second complementarity domain.

[0391] In certain embodiments, the targeting domain comprises, has, or consists of, 26 nucleotides (e.g., 26 consecutive nucleotides) having complementarity with the target domain, e.g., the targeting domain is 26 nucleotides in length; and there are at least 16, 19, 21, 26, 31, 32, 36, 41, 46, 50, 51, or 54 nucleotides 3′ to the last nucleotide of the second complementarity domain that is complementary to its corresponding nucleotide of the first complementarity domain.

[0392] gRNA Delivery

[0393] In certain embodiments of the methods provided herein, the methods comprise delivery of one or more (e.g., two, three, or four) gRNA molecules as described herein. In certain of these embodiments, the gRNA molecules are delivered by intravenous injection, intramuscular injection, subcutaneous injection, or inhalation.

II. Methods for Designing gRNA Molecules

[0394] Methods for selecting, designing, and validating targeting domains for use in the gRNAs described herein are provided. Exemplary targeting domains for incorporation into gRNAs are also provided herein.

[0395] Methods for selection and validation of target sequences as well as off-target analyses have been described (see, e.g., Mali 2013; Hsu 2013; Fu 2014; Heigwer 2014; Bae 2014; and Xiao 2014). For example, a software tool can be used to optimize the choice of potential targeting domains corresponding to a user's target sequence, e.g., to minimize total off-target activity across the genome. Off-target activity may be other than cleavage. For each possible targeting domain choice using S. pyogenes Cas9, the tool can identify all off-target sequences (preceding either NAG or NGG PAMs) across the genome that contain up to certain number (e.g., 1, 2, 3, 4, 5, 6, 7, 8, 9, or 10) of mismatched base-pairs. The cleavage efficiency at each off-target sequence can be predicted, e.g., using an experimentally-derived weighting scheme. Each possible targeting domain is then ranked according to its total predicted off-target cleavage; the top-ranked targeting domains represent those that are likely to have the greatest on-target cleavage and the least off-target cleavage. Other functions, e.g., automated reagent design for CRISPR construction, primer design for the on-target Surveyor assay, and primer design for high-throughput detection and quantification of off-target cleavage via next-gen sequencing, can also be included in the tool. Candidate targeting domains and gRNAs comprising those targeting domains can be functionally evaluated by using methods known in the art and/or as set forth herein.

[0396] As a non-limiting example, targeting domains for use in gRNAs for use with S. pyogenes, and S. aureus Cas9s were identified using a DNA sequence searching algorithm. 17-mer and 20-mer targeting domains were designed for S. pyogenes targets, while 18-mer, 19-mer, 20-mer, 21-mer, 22-mer, 23-mer, and 24-mer targeting domains were designed for S. aureus targets. gRNA design was carried out using a custom gRNA design software based on the public tool cas-offinder (Bae 2014). This software scores guides after calculating their genome-wide off-target propensity. Typically matches ranging from perfect matches to 7 mismatches are considered for guides ranging in length from 17 to 24. Once the off-target sites are computationally-determined, an aggregate score is calculated for each guide and summarized in a tabular output using a web-interface. In addition to identifying potential target sites adjacent to PAM sequences, the software also identifies all PAM adjacent sequences that differ by 1, 2, 3 or more than 3 nucleotides from the selected target sites. Genomic DNA sequences for a HBB gene was obtained from the UCSC Genome browser and sequences were screened for repeat elements using the publically available RepeatMasker program. RepeatMasker searches input DNA sequences for repeated elements and regions of low complexity. The output is a detailed annotation of the repeats present in a given query sequence.

[0397] Following identification, targeting domains were ranked into tiers based on their distance to the target site, their orthogonality and presence of a 5′ G (based on identification of close matches in the human genome containing a relevant PAM e.g., NGG PAM for S. pyogenes, NNGRRT or NNGRRV PAM for S. aureus. Orthogonality refers to the number of sequences in the human genome that contain a minimum number of mismatches to the target sequence. A “high level of orthogonality” or “good orthogonality” may, for example, refer to 20-mer targeting domains that have no identical sequences in the human genome besides the intended target, nor any sequences that contain one or two mismatches in the target sequence. Targeting domains with good orthogonality are selected to minimize off-target DNA cleavage.

[0398] Targeting domains were identified for both single-gRNA nuclease cleavage and for a dual-gRNA paired “nickase” strategy. Criteria for selecting targeting domains and the determination of which targeting domains can be incorporated into a gRNA and used for the dual-gRNA paired “nickase” strategy is based on two considerations:
[0399] 1. gRNA pairs should be oriented on the DNA such that PAMs are facing out and cutting with the D10A Cas9 nickase will result in 5′ overhangs.
[0400] 2. An assumption that cleaving with dual nickase pairs will result in deletion of the entire intervening sequence at a reasonable frequency. However, cleaving with dual nickase pairs can also result in indel mutations at the site of only one of the gRNA molecules. Candidate pair members can be tested for how efficiently they remove the entire sequence versus causing indel mutations at the target site of one gRNA molecule.

[0401] Targeting Domains for Use in Correcting the E6V Mutation in the HBB Gene

[0402] Targeting domains to target the E6V mutation in the HBB gene in conjunction with the methods disclosed herein were identified and ranked into tiers for S. pyogenes, S. aureus and N. meningitidis.

[0403] A. First Targeting Domain Selection Strategy

[0404] For S. pyogenes Cas9, targeting domains were identified and ranked into three tiers. Tier 1 targeting domains were selected based on (1) a reasonable distance upstream or downstream from either end of the target site, and (2) a high level of orthogonality. Tier 2 targeting domains were selected based on (1) a reasonable distance upstream or downstream from either end of the target site, and (2) presence of a 5′G. Tier 3 targeting domains were selected based on (1) a reasonable upstream or downstream from either end of the target site.

[0405] For S. aureus Cas9, targeting domains were identified manually by scanning genomic DNA sequence for the presence of PAM sequences. These gRNAs were not separated into tiers.

[0406] Note that tiers are non-inclusive (each targeting domain is listed only once for the strategy). The identified targeting domains are summarized below in Table 1.

TABLE 1
Nucleic Acid Sequences of S. pyogenes and S. aureus targeting domains

| Tier | S. pyogenes | S. aureus* |
|---|---|---|
| Tier 1 | SEQ ID NOs: 387-390 | SEQ ID NOs: 442-485 |
| Tier 2 | SEQ ID NOs: 391-404 | |
| Tier 3 | SEQ ID NOs: 405-441 | |

*Not separated into tiers.

[0407] In certain embodiments, a point mutation in the HBB gene, e.g., at E6, e.g., E6V, is targeted, e.g., for correction by gene conversion. In certain embodiments, the targeting domain of a gRNA molecule comprises a sequence that is the same as, or differs by no more than 1, 2, 3, 4, or 5 nucleotides from, a targeting domain sequence from any one of Table 1. In certain embodiments, the targeting domain is selected from those in Tables 1. For example, in certain embodiments, the targeting domain is:

(SEQ ID NO: 387)
AAGGUGAACGUGGAUGAAGU;
(SEQ ID NO: 388)
GUAACGGCAGACUUCUCCUC;
(SEQ ID NO: 389)
GUGAACGUGGAUGAAGU;
(SEQ ID NO: 390)
ACGGCAGACUUCUCCUC;
or
(SEQ ID NO: 16318)
GUAACGGCAGACUUCUCCAC.

[0408] In certain embodiments, when the SCD target point position is E6, e.g., E6V, and two gRNAs are used to position two breaks, e.g., two single stranded breaks, in the target nucleic acid sequence, the targeting domain of each gRNA molecule is selected from one of Table 1.

[0409] B. Second Targeting Domain Selection Strategy

[0410] For S. pyogenes Cas9, targeting domains were identified and ranked into four tiers. Tier 1 targeting domains were selected based on (1) a short distance upstream or downstream from either end of the target site, e.g., within 100 bp upstream and 100 bp downstream of the E6V mutation, (2) a high level of orthogonality, and (3) the presence of a 5′ G. Tier 2 targeting domains were selected based on (1) a short distance upstream or downstream from either end of the target site, e.g., within 100 bp upstream and 100 bp downstream of the E6V mutation, and (2) a high level of orthogonality. Tier 3 targeting domains were selected based on (1) a short distance upstream or downstream from either end of the target site, e.g., within 100 bp upstream and 100 bp downstream of the E6V mutation, (2) the presence of a 5′ G. Tier 4 targeting domains were selected based on (1) a short distance upstream or downstream from either end of the target site, e.g., within 100 bp upstream and 100 bp downstream of the E6V mutation.

[0411] For S. aureus Cas9, targeting domains were identified and ranked into 5 tiers. Tier 1 targeting domains were selected based on (1) a short distance upstream or downstream from either end of the target site, e.g., within 100 bp upstream and 100 bp downstream of the E6V mutation, (2) a high level of orthogonality, and (3) the presence of a 5′ G. Tier 2 targeting domains were selected based on (1) a short distance upstream or downstream from either end of the target site, e.g., within 100 bp upstream and 100 bp downstream of the E6V mutation, and (2) a high level of orthogonality. Tier 3 targeting domains were selected based on (1) a short distance upstream or downstream from either end of the target site, e.g., within 100 bp upstream and 100 bp downstream of the E6V mutation, and (2) the presence of a 5′ G. Tier 4 targeting domains were selected based on (1) a short distance upstream or downstream from either end of the target site, e.g., within 100 bp upstream and 100 bp downstream of the E6V mutation. Tier 5 targeting domains were selected based on (1) a short distance upstream or downstream from either end of the target site, e.g., within 100 bp upstream and 100 bp downstream of the E6V mutation, and (2) the PAM is NNGRRV.

[0412] Note that tiers are non-inclusive (each targeting domain is listed only once for the strategy). In certain instances, no targeting domain was identified based on the criteria of the particular tier. The identified targeting domains are summarized below in Table 2.

TABLE 2
Nucleic Acid Sequences of S. pyogenes and S. aureus targeting domains

| Tier | S. pyogenes | S. aureus |
|---|---|---|
| Tier 1 | SEQ ID NOs: 6803-6804 | SEQ ID NO: 6855 |
| Tier 2 | SEQ ID NOs: 6805-6810 | SEQ ID NO: 6856 |
| Tier 3 | SEQ ID NOs: 6811-6822 | N/A |
| Tier 4 | SEQ ID NOs: 6823-6854 | N/A |
| Tier 5 | N/A | SEQ ID NOs: 6857-6871 |

[0413] Exemplary gRNA pairs can be generated using the following targeting domain pairs: HBB-9 (SEQ ID NO: 6811) and HBB-11 (SEQ ID NO: 6813); HBB-9 (SEQ ID NO: 6811) and HBB-39 (SEQ ID NO: 6841); HBB-20 (SEQ ID NO: 6822) and HBB-11 (SEQ ID NO: 6813); and HBB-20 (SEQ ID NO: 6822) and HBB-39 (SEQ ID NO: 6841).

[0414] In certain embodiments, a point mutation in the HBB gene, e.g., at E6, e.g., E6V, is targeted, e.g., for correction. In certain embodiments, the targeting domain of a gRNA molecule comprises a sequence that is the same as, or differs by no more than 1, 2, 3, 4, or 5 nucleotides from, a targeting domain sequence from any one of Table 2. In certain embodiments, the targeting domain is selected from those in Tables 2. For example, in certain embodiments, the targeting domain is:

(SEQ ID NO: 6803)
GGUGCACCUGACUCCUG;
or
(SEQ ID NO: 6804)
GUAACGGCAGACUUCUCCAC.

[0415] In certain embodiments, when the SCD target point position is E6, e.g., E6V, and two gRNAs are used to position two breaks, e.g., two single stranded breaks, in the target nucleic acid sequence, the targeting domain of each gRNA molecule is selected from one of Table 2.

[0416] C. Third Targeting Domain Selection Strategy

[0417] For S. pyogenes Cas9, targeting domains were identified and ranked into 3 tiers. Tier 1 targeting domains were selected based on (1) distance upstream or downstream from either end of the target site, e.g., within 200 bp upstream and 200 bp downstream of the E6V mutation and (2) a high level of orthogonality. Tier 2 targeting domains were selected based on (1) distance upstream or downstream from either end of the target site, e.g., within 200 bp upstream and 200 bp downstream of the E6V mutation, and (2) the presence of a 5′ G. Tier 3 targeting domains were selected based on (1) distance upstream or downstream from either end of the target site, e.g., within 200 bp upstream and 200 bp downstream of the E6V mutation. For S. aureus Cas9, targeting domains were identified and ranked into 4 tiers. Tier 1 targeting domains were selected based on (1) distance upstream or downstream from either end of the target site, e.g., within 200 bp upstream and 200 bp downstream of the E6V mutation, (2) a high level of orthogonality, and (3) the PAM is NNGRRT. Tier 2 targeting domains were selected based on (1) distance upstream or downstream from either end of the target site, e.g., within 200 bp upstream and 200 bp downstream of the E6V mutation, (2) the presence of a 5′ G, and (3) the PAM is NNGRRT. Tier 3 targeting domains were selected based on (1) distance upstream or downstream from either end of the target site, e.g., within 200 bp upstream and 200 bp downstream of the E6V mutation and (2) the PAM is NNGRRT. Tier 4 targeting domains were selected based on (1) distance upstream or downstream from either end of the target site, e.g., within 200 bp upstream and 200 bp downstream of the E6V mutation and (2) the PAM is NNGRRT.

[0418] For N. meningitidis Cas9, targeting domains were identified and ranked into 3 tiers. Tier 1 targeting domains were selected based on (1) distance upstream or downstream from either end of the target site, e.g., within 200 bp upstream and 200 bp downstream of the E6V mutation and (2) a high level of orthogonality. Tier 2 targeting domains were selected based on (1) distance upstream or downstream from either end of the target site, e.g., within 200 bp upstream and 200 bp downstream of the E6V mutation, and (2) the presence of a 5′ G. Tier 3 targeting domains were selected based on (1) distance upstream or downstream from either end of the target site, e.g., within 200 bp upstream and 200 bp downstream of the E6V mutation.

[0419] Note that tiers are non-inclusive (each targeting domain is listed only once for the strategy). In certain instances, no targeting domain was identified based on the criteria of the particular tier. The identified targeting domains are summarized below in Table 3.

TABLE 3
Nucleic Acid Sequences of S. pyogenes and S. aureus targeting domains

| Tier | S. pyogenes | S. aureus | N. meningitidis |
|---|---|---|---|
| Tier 1 | SEQ ID NOs: 16010-16055 | SEQ ID NOs: | SEQ ID NOs: |
| | | 16085-16098 | 16253-16256 |
| Tier 2 | SEQ ID NOs: 16056-16063 | N/A | |
| Tier 3 | SEQ ID NOs: 16064-16084 | N/A | |
| Tier 4 | N/A | SEQ ID NOs: | |
| | | 16099-16252 | |

[0420] In certain embodiments, a point mutation in the HBB gene, e.g., at E6, e.g., E6V, is targeted, e.g., for correction. In certain embodiments, the targeting domain of a gRNA molecule comprises a sequence that is the same as, or differs by no more than 1, 2, 3, 4, or 5 nucleotides from, a targeting domain sequence from any one of Table 3. In certain embodiments, the targeting domain is selected from those in Table 3.

[0421] In certain embodiments, when the SCD target point position is E6, e.g., E6V, and two gRNA molecules are used to position two breaks, e.g., two single stranded breaks, in the target nucleic acid sequence, the target domain of each gRNA is selected from one of Table 3.

[0422] Other gRNA Design Strategy

[0423] In certain embodiments, two or more (e.g., three or four) gRNA molecules are used with one Cas9 molecule. In another embodiment, when two or more (e.g., three or four) gRNAs are used with two or more Cas9 molecules, at least one Cas9 molecule is from a different species than the other Cas9 molecule(s). For example, when two gRNA molecules are used with two Cas9 molecules, one Cas9 molecule can be from one species and the other Cas9 molecule can be from a different species. Both Cas9 species are used to generate a single or double-strand break, as desired.

[0424] In certain embodiments, dual targeting is used to create two nicks on opposite DNA strands by using Cas9 nickases (e.g., a S. pyogenes Cas9 nickase) with two targeting domains that are complementary to opposite DNA strands, e.g., a gRNA molecule comprising any minus strand targeting domain may be paired any gRNA molecule comprising a plus strand targeting domain provided that the two gRNAs are oriented on the DNA such that PAMs face outward and the distance between the 5′ ends of the gRNAs is 0-50 bp. When selecting gRNA molecules for use in a nickase pair, one gRNA molecule targets a domain in the complementary strand and the second gRNA molecule targets a domain in the non-complementary strand, e.g., a gRNA comprising any minus strand targeting domain may be paired any gRNA molecule comprising a plus strand targeting domain targeting the same target position. In certain embodiments, two 20-mer gRNAs are used to target two Cas9 nucleases (e.g., two S. pyogenes Cas9 nucleases) or two Cas9 nickases (e.g., two S. pyogenes Cas9 nickases), e.g., two gRNAs comprising the targeting domains of HBB-8 (SEQ ID NO: 388) and HBB-15 (SEQ ID NO: 387) are used. In certain embodiments, two 17-mer gRNAs are used to target two Cas9 nucleases or two Cas9 nickases, e.g., two gRNAs comprising the targeting domains of HBB-35 (SEQ ID NO: 389) and HBB-53 (SEQ ID NO: 390) are used. Any of the targeting domains in the tables described herein can be used with a Cas9 molecule that generates a single-strand break (i.e., a S. pyogenes or S. aureus Cas9 nickase) or with a Cas9 molecule that generates a double-strand break (i.e., S. pyogenes or S. aureus Cas9 nuclease).

[0425] In certain embodiments, the targeting domain comprises a sequence that is the same as, or differs by no more than 1, 2, 3, 4, or 5 nucleotides from, a targeting domain sequence described herein, e.g., a targeting domain sequence selected from any one of Tables 1-3. In certain embodiments, the targeting domain is a targeting domain sequence described herein, e.g., a targeting domain sequence selected from those in Tables 1-3.

[0426] HBB gRNA molecules, as described herein, may comprise from 5′ to 3′: a targeting domain (comprising a “core domain”, and optionally a “secondary domain”); a first complementarity domain; a linking domain; a second complementarity domain; a proximal domain; and a tail domain. In an embodiment, the proximal domain and tail domain are taken together as a single domain.

[0427] In an embodiment, a gRNA molecule comprises a linking domain of no more than 25 nucleotides in length; a proximal and tail domain, that taken together, are at least 20 nucleotides in length; and a targeting domain equal to or greater than 16, 17, 18, 19, 20, 21, 22, 23, 24, 25 or 26 nucleotides in length.

[0428] In another embodiment, a gRNA molecule comprises a linking domain of no more than 25 nucleotides in length; a proximal and tail domain, that taken together, are at least 25 nucleotides in length; and a targeting domain equal to or greater than 16, 17, 18, 19, 20, 21, 22, 23, 24, 25 or 26 nucleotides in length.

[0429] In another embodiment, a gRNA molecule comprises a linking domain of no more than 25 nucleotides in length; a proximal and tail domain, that taken together, are at least 30 nucleotides in length; and a targeting domain equal to or greater than 16, 17, 18, 19, 20, 21, 22, 23, 24, 25 or 26 nucleotides in length.

[0430] In another embodiment, a gRNA molecule comprises a linking domain of no more than 25 nucleotides in length; a proximal and tail domain, that taken together, are at least 40 nucleotides in length; and a targeting domain equal to or greater than 16, 17, 18, 19, 20, 21, 22, 23, 24, 25 or 26 nucleotides in length.

[0431] When two gRNAs are designed for use with two Cas9 molecules, the two Cas9 molecules may be from different species. Both Cas9 species may be used to generate a single or double strand break, as desired.

[0432] It is contemplated herein that any upstream gRNA described herein may be paired with any downstream gRNA described herein. When an upstream gRNA designed for use with one species of Cas9 molecule is paired with a downstream gRNA designed for use from a different species of Cas9 molecule, both Cas9 species are used to generate a single or double-strand break, as desired.

### III. Cas9 Molecules

[0433] Cas9 molecules of a variety of species can be used in the methods and compositions described herein. While S. pyogenes and S. aureus Cas9 molecules are the subject of much of the disclosure herein, Cas9 molecules of, derived from, or based on the Cas9 proteins of other species listed herein can be used as well. These include, for example, Cas9 molecules from Acidovorax avenae, Actinobacillus pleuropneumoniae, Actinobacillus succinogenes, Actinobacillus suis, Actinomyces sp., cycliphilus denitrificans, Aminomonas paucivorans, Bacillus cereus, Bacillus smithii, Bacillus thuringiensis, Bacteroides sp., Blastopirellula marina, Bradyrhizobium sp., Brevibacillus laterosporus, Campylobacter coli, Campylobacter jejuni, Campylobacter lari, Candidatus Puniceispirillum, Clostridium cellulolyticum, Clostridium perfringens, Corynebacterium accolens, Corynebacterium diphtheria, Corynebacterium matruchotii, Dinoroseobacter shibae, Eubacterium dolichum, gamma proteobacterium, Gluconacetobacter diazotrophicus, Haemophilus parainfluenzae, Haemophilus sputorum, Helicobacter canadensis, Helicobacter cinaedi, Helicobacter mustelae, Ilyobacter polytropus, Kingella kingae, Lactobacillus crispatus, Listeria ivanovii, Listeria monocytogenes, Listeriaceae bacterium, Methylocystis sp., Methylosinus trichosporium, Mobiluncus mulieris, Neisseria bacilliformis, Neisseria cinerea, Neisseria flavescens, Neisseria lactamica, Neisseria meningitidis, Neisseria sp., Neisseria wadsworthii, Nitrosomonas sp., Parvibaculum lavamentivorans, Pasteurella multocida, Phascolarctobacterium succinatutens, Ralstonia syzygii, Rhodopseudomonas palustris, Rhodovulum sp., Simonsiella muelleri, Sphingomonas sp., Sporolactobacillus vineae, Staphylococcus lugdunensis, Streptococcus sp., Subdoligranulum sp., Tistrella mobilis, Treponema sp., or Verminephrobacter eiseniae. The amino acid sequences of exemplary Cas9 orthologs are set forth in SEQ ID NOs: 304-386.

[0434] Cas9 Domains

[0435] Crystal structures have been determined for two different naturally occurring bacterial Cas9 molecules (Jinek et al. 2014) and for S. pyogenes Cas9 with a guide RNA (e.g., a synthetic fusion of crRNA and tracrRNA) (Nishimasu et al. 2014; and Anders 2014).

[0436] A naturally-occurring Cas9 molecule comprises two lobes: a recognition (REC) lobe and a nuclease (NUC) lobe; each of which further comprise domains described herein. The domain nomenclature and the numbering of the amino acid residues encompassed by each domain used throughout this disclosure is as described previously in (Nishimasu 2014). The numbering of the amino acid residues is with reference to Cas9 from S. pyogenes.

[0437] The REC lobe comprises the arginine-rich bridge helix (BH), the REC1 domain, and the REC2 domain. The REC lobe does not share structural similarity with other known proteins, indicating that it is a Cas9-specific functional domain. The BH domain is a long a helix and arginine rich region and comprises amino acids 60-93 of the sequence of S. pyogenes Cas9. The REC1 domain is important for recognition of the repeat:anti-repeat duplex, e.g., of a gRNA or a tracrRNA, and is therefore critical for Cas9 activity by recognizing the target sequence. The REC1 domain comprises two REC1 motifs at amino acids 94 to 179 and 308 to 717 of the sequence of S. pyogenes Cas9. These two REC1 domains, though separated by the REC2 domain in the linear primary structure, assemble in the tertiary structure to form the REC1 domain. The REC2 domain, or parts thereof, may also play a role in the recognition of the repeat:anti-repeat duplex. The REC2 domain comprises amino acids 180-307 of the sequence of S. pyogenes Cas9.

[0438] The NUC lobe comprises the RuvC domain, the HNH domain, and the PAM-interacting (PI) domain. The RuvC domain shares structural similarity to retroviral integrase superfamily members and cleaves a single strand, e.g., the non-complementary strand of the target nucleic acid molecule. The RuvC domain is assembled from the three split RuvC motifs (RuvC I, RuvCII, and RuvCIII, which are often commonly referred to in the art as RuvCI domain, or N-terminal RuvC domain, RuvCII domain, and RuvCIII domain) at amino acids 1-59, 718-769, and 909-1098, respectively, of the sequence of S. pyogenes Cas9. Similar to the REC1 domain, the three RuvC motifs are linearly separated by other domains in the primary structure, however in the tertiary structure, the three RuvC motifs assemble and form the RuvC domain. The HNH domain shares structural similarity with HNH endonucleases, and cleaves a single strand, e.g., the complementary strand of the target nucleic acid molecule. The HNH domain lies between the RuvC II-III motifs and comprises amino acids 775-908 of the sequence of S. pyogenes Cas9. The PI domain interacts with the PAM of the target nucleic acid molecule, and comprises amino acids 1099-1368 of the sequence of S. pyogenes Cas9.

[0439] RuvC-Like Domain and an HNH-Like Domain

[0440] In certain embodiments, a Cas9 molecule or Cas9 polypeptide comprises an HNH-like domain and a RuvC-like domain and in certain of these embodiments cleavage activity is dependent on the RuvC-like domain and the HNH-like domain. A Cas9 molecule or Cas9 polypeptide can comprise one or more of a RuvC-like domain and an HNH-like domain. In certain embodiments, a Cas9 molecule or Cas9 polypeptide comprises a RuvC-like domain, e.g., a RuvC-like domain described below, and/or an HNH-like domain, e.g., an HNH-like domain described below.

[0441] RuvC-Like Domains

[0442] In certain embodiments, a RuvC-like domain cleaves, a single strand, e.g., the non-complementary strand of the target nucleic acid molecule. The Cas9 molecule or Cas9 polypeptide can include more than one RuvC-like domain (e.g., one, two, three or more RuvC-like domains). In certain embodiments, a RuvC-like domain is at least 5, 6, 7, 8 amino acids in length but not more than 20, 19, 18, 17, 16 or 15 amino acids in length. In certain embodiments, the Cas9 molecule or Cas9 polypeptide comprises an N-terminal RuvC-like domain of about 10 to 20 amino acids, e.g., about 15 amino acids in length.

[0443] N-Terminal RuvC-Like Domains

[0444] Some naturally occurring Cas9 molecules comprise more than one RuvC-like domain with cleavage being dependent on the N-terminal RuvC-like domain. Accordingly, a Cas9 molecule or Cas9 polypeptide can comprise an N-terminal RuvC-like domain. Exemplary N-terminal RuvC-like domains are described below.

[0445] In certain embodiments, a Cas9 molecule or Cas9 polypeptide comprises an N-terminal RuvC-like domain comprising an amino acid sequence of Formula I:

(SEQ ID NO: 8)
D-X₁-G-X₂-X₃-X₄-X₅-G-X₆-X₇-X₈-X₉,

wherein,

[0446] X₁ is selected from I, V, M, L and T (e.g., selected from I, V, and L);

[0447] X₂ is selected from T, I, V, S, N, Y, E and L (e.g., selected from T, V, and I);

[0448] X₃ is selected from N, S, G, A, D, T, R, M and F (e.g., A or N);

[0449] X₄ is selected from S, Y, N and F (e.g., S);

[0450] X₅ is selected from V, I, L, C, T and F (e.g., selected from V, I and L);

[0451] X₆ is selected from W, F, V, Y, S and L (e.g., W);

[0452] X₇ is selected from A, S, C, V and G (e.g., selected from A and S);

[0453] X₈ is selected from V, I, L, A, M and H (e.g., selected from V, I, M and L); and

[0454] X₉ is selected from any amino acid or is absent (e.g., selected from T, V, I, L, Δ, F, S, A, Y, M and R, or, e.g., selected from T, V, I, L and Δ).

[0455] In certain embodiments, the N-terminal RuvC-like domain differs from a sequence of SEQ ID NO:8, by as many as 1 but no more than 2, 3, 4, or 5 residues.

[0456] In certain embodiments, the N-terminal RuvC-like domain is cleavage competent.

[0457] In other embodiments, the N-terminal RuvC-like domain is cleavage incompetent.

[0458] In certain embodiments, a Cas9 molecule or Cas9 polypeptide comprises an N-terminal RuvC-like domain comprising an amino acid sequence of Formula II:

(SEQ ID NO: 9)
D-X₁-G-X₂-X₃-S-X₅-G-X₆-X₇-X₈-X₉,,

wherein

[0459] X₁ is selected from I, V, M, L and T (e.g., selected from I, V, and L);

[0460] X₂ is selected from T, I, V, S, N, Y, E and L (e.g., selected from T, V, and I);

[0461] X₃ is selected from N, S, G, A, D, T, R, M and F (e.g., A or N);

[0462] X₅ is selected from V, I, L, C, T and F (e.g., selected from V, I and L);

[0463] X₆ is selected from W, F, V, Y, S and L (e.g., W);

[0464] X₇ is selected from A, S, C, V and G (e.g., selected from A and S);

[0465] X₈ is selected from V, I, L, A, M and H (e.g., selected from V, I, M and L); and

[0466] X₉ is selected from any amino acid or is absent (e.g., selected from T, V, I, L, Δ, F, S, A, Y, M and R or selected from e.g., T, V, I, L and Δ).

[0467] In certain embodiments, the N-terminal RuvC-like domain differs from a sequence of SEQ ID NO:9 by as many as 1 but not more than 2, 3, 4, or 5 residues.

[0468] In certain embodiments, the N-terminal RuvC-like domain comprises an amino acid sequence of Formula III:

(SEQ ID NO: 10)
D-I-G-X₂-X₃-S-V-G-W-A-X₈-X₉,

wherein

[0469] X₂ is selected from T, I, V, S, N, Y, E and L (e.g., selected from T, V, and I);

[0470] X₃ is selected from N, S, G, A, D, T, R, M and F (e.g., A or N);

[0471] X₈ is selected from V, I, L, A, M and H (e.g., selected from V, I, M and L); and

[0472] X₉ is selected from any amino acid or is absent (e.g., selected from T, V, I, L, Δ, F, S, A, Y, M and R or selected from e.g., T, V, I, L and Δ).

[0473] In certain embodiments, the N-terminal RuvC-like domain differs from a sequence of SEQ ID NO:10 by as many as 1 but not more than, 2, 3, 4, or 5 residues.

[0474] In certain embodiments, the N-terminal RuvC-like domain comprises an amino acid sequence of Formula IV:

(SEQ ID NO: 11)
D-I-G-T-N-S-V-G-W-A-V-X,

wherein

[0475] X is a non-polar alkyl amino acid or a hydroxyl amino acid, e.g., X is selected from V, I, L and T.

[0476] In certain embodiments, the N-terminal RuvC-like domain differs from a sequence of SEQ ID NO:11 by as many as 1 but not more than, 2, 3, 4, or 5 residues.

[0477] In certain embodiments, the N-terminal RuvC-like domain differs from a sequence of an N-terminal RuvC like domain disclosed herein, e.g., in any one of SEQ ID Nos: 54-103, as many as 1 but no more than 2, 3, 4, or 5 residues. In certain embodiments, 1, 2, 3 or all of the highly conserved residues of SEQ ID Nos: 54-103 are present.

[0478] In certain embodiment, the N-terminal RuvC-like domain differs from a sequence of an N-terminal RuvC-like domain disclosed herein, e.g., in any one of SEQ ID Nos: 104-177, as many as 1 but no more than 2, 3, 4, or 5 residues. In certain embodiments, 1, 2, or all of the highly conserved residues identified of SEQ ID Nos: 104-177 are present.

[0479] Additional RuvC-Like Domains

[0480] In addition to the N-terminal RuvC-like domain, the Cas9 molecule or Cas9 polypeptide can comprise one or more additional RuvC-like domains. In certain embodiments, the Cas9 molecule or Cas9 polypeptide can comprise two additional RuvC-like domains. Preferably, the additional RuvC-like domain is at least 5 amino acids in length and, e.g., less than 15 amino acids in length, e.g., 5 to 10 amino acids in length, e.g., 8 amino acids in length.

[0481] An additional RuvC-like domain can comprise an amino acid sequence of Formula V:

I—X₁-X₂-E-X₃-A-R-E (SEQ ID NO:12), wherein

[0482] X₁ is V or H;

[0483] X₂ is I, L or V (e.g., I or V); and

[0484] X₃ is M or T.

[0485] In certain embodiments, the additional RuvC-like domain comprises an amino acid sequence of Formula VI:

I—V—X₂-E-M-A-R-E (SEQ ID NO:13), wherein

[0486] X₂ is I, L or V (e.g., I or V).

[0487] An additional RuvC-like domain can comprise an amino acid sequence of Formula VII:

H—H-A-X₁-D-A-X₂-X₃ (SEQ ID NO: 14), wherein

[0488] X₁ is H or L;

[0489] X₂ is R or V; and

[0490] X₃ is E or V.

[0491] In certain embodiments, the additional RuvC-like domain comprises the amino acid sequence: H—H-A-H-D-A-Y-L (SEQ ID NO:15).

[0492] In certain embodiments, the additional RuvC-like domain differs from a sequence of SEQ ID NOs: 12-15 by as many as 1 but not more than 2, 3, 4, or 5 residues.

[0493] In certain embodiment, the sequence flanking the N-terminal RuvC-like domain has the amino acid sequence of Formula VIII:

(SEQ ID NO: 16)
K-X₁′-Y-X₂′-X₃′-X₄′-Z-T-D-X₉′-Y,.

wherein

[0494] X₁′ is selected from K and P;

[0495] X₂′ is selected from V, L, I, and F (e.g., V, I and L);

[0496] X₃′ is selected from G, A and S (e.g., G);

[0497] X₄′ is selected from L, I, V and F (e.g., L);

[0498] X₉′ is selected from D, E, N and Q; and

[0499] Z is an N-terminal RuvC-like domain, e.g., as described above, e.g., having 5 to 20 amino acids.

[0500] HNH-Like Domains

[0501] In certain embodiments, an HNH-like domain cleaves a single stranded complementary domain, e.g., a complementary strand of a double stranded nucleic acid molecule. In certain embodiments, an HNH-like domain is at least 15, 20, or 25 amino acids in length but not more than 40, 35, or 30 amino acids in length, e.g., 20 to 35 amino acids in length, e.g., 25 to 30 amino acids in length. Exemplary HNH-like domains are described below.

[0502] In certain embodiments, a Cas9 molecule or Cas9 polypeptide comprises an HNH-like domain having an amino acid sequence of Formula IX:

X₁-X₂-X₃—H—X₄-X₅—P—X₆-X₇-X₈-X₉-X₁₀-X₁₁-X₁₂-X₁₃-X₁₄-X₁₅—N—X₁₆-X₁₇-X₁₈-X₁₉-X₂₀-X₂₁-X₂₂-X₂₃—N (SEQ ID NO: 17), wherein

[0503] X₁ is selected from D, E, Q and N (e.g., D and E);

[0504] X₂ is selected from L, I, R, Q, V, M and K;

[0505] X₃ is selected from D and E;

[0506] X₄ is selected from I, V, T, A and L (e.g., A, I and V);

[0507] X₅ is selected from V, Y, I, L, F and W (e.g., V, I and L);

[0508] X₆ is selected from Q, H, R, K, Y, I, L, F and W;

[0509] X₇ is selected from S, A, D, T and K (e.g., S and A);

[0510] X₈ is selected from F, L, V, K, Y, M, I, R, A, E, D and Q (e.g., F);

[0511] X₉ is selected from L, R, T, I, V, S, C, Y, K, F and G;

[0512] X₁₀ is selected from K, Q, Y, T, F, L, W, M, A, E, G, and S;

[0513] X₁₁ is selected from D, S, N, R, L and T (e.g., D);

[0514] X₁₂ is selected from D, N and S;

[0515] X₁₃ is selected from S, A, T, G and R (e.g., S);

[0516] X₁₄ is selected from I, L, F, S, R, Y, Q, W, D, K and H (e.g., I, L and F);

[0517] X₁₅ is selected from D, S, I, N, E, A, H, F, L, Q, M, G, Y and V;

[0518] X₁₆ is selected from K, L, R, M, T and F (e.g., L, R and K);

[0519] X₁₇ is selected from V, L, I, A and T;

[0520] X₁₈ is selected from L, I, V and A (e.g., L and I);

[0521] X₁₉ is selected from T, V, C, E, S and A (e.g., T and V);

[0522] X₂₀ is selected from R, F, T, W, E, L, N, C, K, V, S, Q, I, Y, H and A;

[0523] X₂₁ is selected from S, P, R, K, N, A, H, Q, G and L;

[0524] X₂₂ is selected from D, G, T, N, S, K, A, I, E, L, Q, R and Y; and

[0525] X₂₃ is selected from K, V, A, E, Y, I, C, L, S, T, G, K, M, D and F.

[0526] In certain embodiments, a HNH-like domain differs from a sequence of SEQ ID NO: 17 by at least one but not more than, 2, 3, 4, or 5 residues.

[0527] In certain embodiments, the HNH-like domain is cleavage competent.

[0528] In other embodiments, the HNH-like domain is cleavage incompetent.

[0529] In certain embodiments, a Cas9 molecule or Cas9 polypeptide comprises an HNH-like domain comprising an amino acid sequence of Formula X:

(SEQ ID NO: 18)
X₁-X₂-X₃-H-X₄-X₅-P-X₆-S-X₈-X₉-X₁₀-D-D-S-X₁₄-X₁₅-N-
K-V-L-X₁₉-X₂₀-X₂₁-X₂₂-X₂₃-N,

wherein

[0530] X₁ is selected from D and E;

[0531] X₂ is selected from L, I, R, Q, V, M and K;

[0532] X₃ is selected from D and E;

[0533] X₄ is selected from I, V, T, A and L (e.g., A, I and V);

[0534] X₅ is selected from V, Y, I, L, F and W (e.g., V, I and L);

[0535] X₆ is selected from Q, H, R, K, Y, I, L, F and W;

[0536] X₈ is selected from F, L, V, K, Y, M, I, R, A, E, D and Q (e.g., F);

[0537] X₉ is selected from L, R, T, I, V, S, C, Y, K, F and G;

[0538] X₁₀ is selected from K, Q, Y, T, F, L, W, M, A, E, G, and S;

[0539] X₁₄ is selected from I, L, F, S, R, Y, Q, W, D, K and H (e.g., I, L and F);

[0540] X₁₅ is selected from D, S, I, N, E, A, H, F, L, Q, M, G, Y and V;

[0541] X₁₉ is selected from T, V, C, E, S and A (e.g., T and V);

[0542] X₂₀ is selected from R, F, T, W, E, L, N, C, K, V, S, Q, I, Y, H and A;

[0543] X₂₁ is selected from S, P, R, K, N, A, H, Q, G and L;

[0544] X₂₂ is selected from D, G, T, N, S, K, A, I, E, L, Q, R and Y; and

[0545] X₂₃ is selected from K, V, A, E, Y, I, C, L, S, T, G, K, M, D and F.

[0546] In certain embodiments, the HNH-like domain differs from a sequence of SEQ ID NO: 18 by 1, 2, 3, 4, or 5 residues.

[0547] In certain embodiments, a Cas9 molecule or Cas9 polypeptide comprises an HNH-like domain comprising an amino acid sequence of Formula XI:

(SEQ ID NO: 19)
X₁-V-X₃-H-I-V-P-X₆-S-X₈-X₉-X₁₀-D-D-S-X₁₄-X₁₅-N-K-
V-L-T-X₂₀-X₂₁-X₂₂-X₂₃-N,

wherein

[0548] X₁ is selected from D and E;

[0549] X₃ is selected from D and E;

[0550] X₆ is selected from Q, H, R, K, Y, I, L and W;

[0551] X₈ is selected from F, L, V, K, Y, M, I, R, A, E, D and Q (e.g., F);

[0552] X₉ is selected from L, R, T, I, V, S, C, Y, K, F and G;

[0553] X₁₀ is selected from K, Q, Y, T, F, L, W, M, A, E, G, and S;

[0554] X₁₄ is selected from I, L, F, S, R, Y, Q, W, D, K and H (e.g., I, L and F);

[0555] X₁₅ is selected from D, S, I, N, E, A, H, F, L, Q, M, G, Y and V;

[0556] X₂₀ is selected from R, F, T, W, E, L, N, C, K, V, S, Q, I, Y, H and A;

[0557] X₂₁ is selected from S, P, R, K, N, A, H, Q, G and L;

[0558] X₂₂ is selected from D, G, T, N, S, K, A, I, E, L, Q, R and Y; and

[0559] X₂₃ is selected from K, V, A, E, Y, I, C, L, S, T, G, K, M, D and F.

[0560] In certain embodiments, the HNH-like domain differs from a sequence of SEQ ID NO: 19 by 1, 2, 3, 4, or 5 residues.

[0561] In certain embodiments, a Cas9 molecule or Cas9 polypeptide comprises an HNH-like domain having an amino acid sequence of Formula XII:

(SEQ ID NO: 20)
D-X₂-D-H-I-X₅-P-Q-X₇-F-X₉-X₁₀-D-X₁₂-S-I-D-N-X₁₆-
V-L-X₁₉-X₂₀-S-X₂₂-X₂₃-N,

wherein

[0562] X₂ is selected from I and V;

[0563] X₅ is selected from I and V;

[0564] X₇ is selected from A and S;

[0565] X₉ is selected from I and L;

[0566] X₁₀ is selected from K and T;

[0567] X₁₂ is selected from D and N;

[0568] X₁₆ is selected from R, K and L;

[0569] X₁₉ is selected from T and V;

[0570] X₂₀ is selected from S and R;

[0571] X₂₂ is selected from K, D and A; and

[0572] X₂₃ is selected from E, K, G and N (e.g., the Cas9 molecule or Cas9 polypeptide can comprise an HNH-like domain as described herein).

[0573] In certain embodiments, the HNH-like domain differs from a sequence of SEQ ID NO: 20 by as many as 1 but not more than 2, 3, 4, or 5 residues.

[0574] In certain embodiments, a Cas9 molecule or Cas9 polypeptide comprises the amino acid sequence of formula XIII:

(SEQ ID NO: 21)
L-Y-Y-L-Q-N-G-X₁′-D-M-Y-X₂′-X₃′-X₄′-X₅′-L-D-I-
X₆′-X₇′-L-S-X₈′-Y-Z-N-R-X₉′-K-X₁₀′-D-X₁₁′-V-P,

wherein

[0575] X₁′ is selected from K and R;

[0576] X₂′ is selected from V and T;

[0577] X₃′ is selected from G and D;

[0578] X₄′ is selected from E, Q and D;

[0579] X₅′ is selected from E and D;

[0580] X₆′ is selected from D, N and H;

[0581] X₇′ is selected from Y, R and N;

[0582] X₈′ is selected from Q, D and N;

[0583] X₉′ is selected from G and E;

[0584] X₁₀′ is selected from S and G;

[0585] X₁₁′ is selected from D and N; and

[0586] Z is an HNH-like domain, e.g., as described above.

[0587] In certain embodiment, a Cas9 molecule or Cas9 polypeptide comprises an amino acid sequence that differs from a sequence of SEQ ID NO:21 by as many as 1 but not more than 2, 3, 4, or 5 residues.

[0588] In certain embodiments, the HNH-like domain differs from a sequence of an HNH-like domain disclosed herein, e.g., in SEQ ID Nos: 178-252, as many as 1 but not more than 2, 3, 4, or 5 residues. In certain embodiments, 1 or both of the highly conserved residues of SEQ ID Nos: 178-252 are present.

[0589] In certain embodiments, the HNH-like domain differs from a sequence of an HNH-like domain disclosed herein, e.g., in SEQ ID Nos: 253-302, as many as 1 but not more than 2, 3, 4, or 5 residues. In certain embodiments, 1, 2, all 3 of the highly conserved residues of SEQ ID Nos: 253-302 are present.

[0590] Cas9 Activities

[0591] In certain embodiments, the Cas9 molecule or Cas9 polypeptide is capable of cleaving a target nucleic acid molecule. Typically wild-type Cas9 molecules cleave both strands of a target nucleic acid molecule. Cas9 molecules and Cas9 polypeptides can be engineered to alter nuclease cleavage (or other properties), e.g., to provide a Cas9 molecule or Cas9 polypeptide which is a nickase, or which lacks the ability to cleave target nucleic acid. A Cas9 molecule or Cas9 polypeptide that is capable of cleaving a target nucleic acid molecule is referred to herein as an eaCas9 (an enzymatically active Cas9) molecule or eaCas9 polypeptide.

[0592] In certain embodiments, an eaCas9 molecule or eaCas9 polypeptide comprises one or more of the following enzymatic activities:

[0593] a nickase activity, i.e., the ability to cleave a single strand, e.g., the non-complementary strand or the complementary strand, of a nucleic acid molecule;

[0594] a double stranded nuclease activity, i.e., the ability to cleave both strands of a double stranded nucleic acid and create a double stranded break, which in an embodiment is the presence of two nickase activities;

[0595] an endonuclease activity;

[0596] an exonuclease activity; and

[0597] a helicase activity, i.e., the ability to unwind the helical structure of a double stranded nucleic acid.

[0598] In certain embodiments, an enzymatically active Cas9 or eaCas9 molecule or eaCas9 polypeptide cleaves both DNA strands and results in a double stranded break. In certain embodiments, an eaCas9 molecule or eaCas9 polypeptide cleaves only one strand, e.g., the strand to which the gRNA hybridizes to, or the strand complementary to the strand the gRNA hybridizes with. In an embodiment, an eaCas9 molecule or eaCas9 polypeptide comprises cleavage activity associated with an HNH domain. In an embodiment, an eaCas9 molecule or eaCas9 polypeptide comprises cleavage activity associated with a RuvC domain. In an embodiment, an eaCas9 molecule or eaCas9 polypeptide comprises cleavage activity associated with an HNH domain and cleavage activity associated with a RuvC domain. In an embodiment, an eaCas9 molecule or eaCas9 polypeptide comprises an active, or cleavage competent, HNH domain and an inactive, or cleavage incompetent, RuvC domain. In an embodiment, an eaCas9 molecule or eaCas9 polypeptide comprises an inactive, or cleavage incompetent, HNH domain and an active, or cleavage competent, RuvC domain.

[0599] Some Cas9 molecules or Cas9 polypeptides have the ability to interact with a gRNA molecule, and in conjunction with the gRNA molecule localize to a core target domain, but are incapable of cleaving the target nucleic acid, or incapable of cleaving at efficient rates. Cas9 molecules having no, or no substantial, cleavage activity are referred to herein as an eiCas9 molecule or eiCas9 polypeptide. For example, an eiCas9 molecule or eiCas9 polypeptide can lack cleavage activity or have substantially less, e.g., less than 20, 10, 5, 1 or 0.1% of the cleavage activity of a reference Cas9 molecule or eiCas9 polypeptide, as measured by an assay described herein.

[0600] Targeting and PAMs

[0601] A Cas9 molecule or Cas9 polypeptide that can interact with a gRNA molecule and, in concert with the gRNA molecule, localizes to a site which comprises a target domain, and in certain embodiments, a PAM sequence.

[0602] In certain embodiments, the ability of an eaCas9 molecule or eaCas9 polypeptide to interact with and cleave a target nucleic acid is PAM sequence dependent. A PAM sequence is a sequence in the target nucleic acid. In an embodiment, cleavage of the target nucleic acid occurs upstream from the PAM sequence. eaCas9 molecules from different bacterial species can recognize different sequence motifs (e.g., PAM sequences). In an embodiment, an eaCas9 molecule of S. pyogenes recognizes the sequence motif NGG and directs cleavage of a target nucleic acid sequence 1 to 10, e.g., 3 to 5, bp upstream from that sequence (see, e.g., Mali 2013). In an embodiment, an eaCas9 molecule of S. thermophilus recognizes the sequence motif NGGNG and/or NNAGAAW (W=A or T) and directs cleavage of a target nucleic acid sequence 1 to 10, e.g., 3 to 5, bp upstream from these sequences (see, e.g., Horvath 2010; Deveau 2008). In an embodiment, an eaCas9 molecule of S. mutans recognizes the sequence motif NGG and/or NAAR (R=A or G) and directs cleavage of a target nucleic acid sequence 1 to 10, e.g., 3 to 5, bp upstream from this sequence (see, e.g., Deveau 2008). In an embodiment, an eaCas9 molecule of S. aureus recognizes the sequence motif NNGRR (R=A or G) and directs cleavage of a target nucleic acid sequence 1 to 10, e.g., 3 to 5, bp upstream from that sequence. In an embodiment, an eaCas9 molecule of S. aureus recognizes the sequence motif NNGRRN (R=A or G) and directs cleavage of a target nucleic acid sequence 1 to 10, e.g., 3 to 5, bp upstream from that sequence. In an embodiment, an eaCas9 molecule of S. aureus recognizes the sequence motif NNGRRT (R=A or G) and directs cleavage of a target nucleic acid sequence 1 to 10, e.g., 3 to 5, base pairs upstream from that sequence. In an embodiment, an eaCas9 molecule of S. aureus recognizes the sequence motif NNGRRV (R=A or G) and directs cleavage of a target nucleic acid sequence 1 to 10, e.g., 3 to 5, bp upstream from that sequence. The ability of a Cas9 molecule to recognize a PAM sequence can be determined, e.g., using a transformation assay as described in Jinek 2012. In the aforementioned embodiments, N can be any nucleotide residue, e.g., any of A, G, C, or T.

[0603] As is discussed herein, Cas9 molecules can be engineered to alter the PAM specificity of the Cas9 molecule.

[0604] Exemplary naturally occurring Cas9 molecules have been described previously (see, e.g., Chylinski 2013). Such Cas9 molecules include Cas9 molecules of a cluster 1 bacterial family, cluster 2 bacterial family, cluster 3 bacterial family, cluster 4 bacterial family, cluster 5 bacterial family, cluster 6 bacterial family, a cluster 7 bacterial family, a cluster 8 bacterial family, a cluster 9 bacterial family, a cluster 10 bacterial family, a cluster 11 bacterial family, a cluster 12 bacterial family, a cluster 13 bacterial family, a cluster 14 bacterial family, a cluster 15 bacterial family, a cluster 16 bacterial family, a cluster 17 bacterial family, a cluster 18 bacterial family, a cluster 19 bacterial family, a cluster 20 bacterial family, a cluster 21 bacterial family, a cluster 22 bacterial family, a cluster 23 bacterial family, a cluster 24 bacterial family, a cluster 25 bacterial family, a cluster 26 bacterial family, a cluster 27 bacterial family, a cluster 28 bacterial family, a cluster 29 bacterial family, a cluster 30 bacterial family, a cluster 31 bacterial family, a cluster 32 bacterial family, a cluster 33 bacterial family, a cluster 34 bacterial family, a cluster 35 bacterial family, a cluster 36 bacterial family, a cluster 37 bacterial family, a cluster 38 bacterial family, a cluster 39 bacterial family, a cluster 40 bacterial family, a cluster 41 bacterial family, a cluster 42 bacterial family, a cluster 43 bacterial family, a cluster 44 bacterial family, a cluster 45 bacterial family, a cluster 46 bacterial family, a cluster 47 bacterial family, a cluster 48 bacterial family, a cluster 49 bacterial family, a cluster 50 bacterial family, a cluster 51 bacterial family, a cluster 52 bacterial family, a cluster 53 bacterial family, a cluster 54 bacterial family, a cluster 55 bacterial family, a cluster 56 bacterial family, a cluster 57 bacterial family, a cluster 58 bacterial family, a cluster 59 bacterial family, a cluster 60 bacterial family, a cluster 61 bacterial family, a cluster 62 bacterial family, a cluster 63 bacterial family, a cluster 64 bacterial family, a cluster 65 bacterial family, a cluster 66 bacterial family, a cluster 67 bacterial family, a cluster 68 bacterial family, a cluster 69 bacterial family, a cluster 70 bacterial family, a cluster 71 bacterial family, a cluster 72 bacterial family, a cluster 73 bacterial family, a cluster 74 bacterial family, a cluster 75 bacterial family, a cluster 76 bacterial family, a cluster 77 bacterial family, or a cluster 78 bacterial family.

[0605] Exemplary naturally occurring Cas9 molecules include a Cas9 molecule of a cluster 1 bacterial family. Examples include a Cas9 molecule of: S. aureus, S. pyogenes (e.g., strain SF370, MGAS10270, MGAS10750, MGAS2096, MGAS315, MGAS5005, MGAS6180, MGAS9429, NZ131 and SSI-1), S. thermophilus (e.g., strain LMD-9), S. pseudoporcinus (e.g., strain SPIN 20026), S. mutans (e.g., strain UA159, NN2025), S. macacae (e.g., strain NCTC11558), S. gallolyticus (e.g., strain UCN34, ATCC BAA-2069), S. equines (e.g., strain ATCC 9812, MGCS 124), S. dysdalactiae (e.g., strain GGS 124), S. bovis (e.g., strain ATCC 700338), S. anginosus (e.g., strain F0211), S. agalactiae (e.g., strain NEM316, A909), Listeria monocytogenes (e.g., strain F6854), Listeria innocua (L. innocua, e.g., strain Clip11262), Enterococcus italicus (e.g., strain DSM 15952), or Enterococcus faecium (e.g., strain 1,231,408).

[0606] In certain embodiments, a Cas9 molecule or Cas9 polypeptide comprises an amino acid sequence: having 60%, 65%, 70%, 75%, 80%, 85%, 90%, 95%, 96%, 97%, 98% or 99% homology with; differs at no more than, 2, 5, 10, 15, 20, 30, or 40% of the amino acid residues when compared with; differs by at least 1, 2, 5, 10 or 20 amino acids, but by no more than 100, 80, 70, 60, 50, 40 or 30 amino acids from; or is identical to any Cas9 molecule sequence described herein, or to a naturally occurring Cas9 molecule sequence, e.g., a Cas9 molecule from a species listed herein (e.g., SEQ ID NO:1-4 or described in Chylinski 2013 or Hou 2013). In an embodiment, the Cas9 molecule or Cas9 polypeptide comprises one or more of the following activities: a nickase activity; a double stranded cleavage activity (e.g., an endonuclease and/or exonuclease activity); a helicase activity; or the ability, together with a gRNA molecule, to localize to a target nucleic acid.

[0607] A comparison of the sequence of a number of Cas9 molecules indicate that certain regions are conserved. These are identified below as:

[0608] region 1 (residues 1 to 180, or in the case of region 1, residues 120 to 180)

[0609] region 2 (residues 360 to 480);

[0610] region 3 (residues 660 to 720);

[0611] region 4 (residues 817 to 900); and

[0612] region 5 (residues 900 to 960).

[0613] In an embodiment, a Cas9 molecule or Cas9 polypeptide comprises regions 1-5, together with sufficient additional Cas9 molecule sequence to provide a biologically active molecule, e.g., a Cas9 molecule having at least one activity described herein. In an embodiment, each of regions 1-5, independently, have 50%, 60%, 70%, 80%, 85%, 90%, 95%, 96%, 97%, 98% or 99% homology with the corresponding residues of a Cas9 molecule or Cas9 polypeptide described herein, e.g., a sequence from SEQ ID Nos: 1-4.

[0614] In an embodiment, a Cas9 molecule or Cas9 polypeptide comprises an amino acid sequence referred to as region 1:

[0615] having 50%, 60%, 70%, 80%, 85%, 90%, 95%, 96%, 97%, 98% or 99% homology with amino acids 1-180 of the amino acid sequence of Cas9 of S. pyogenes;

[0616] differs by at least 1, 2, 5, 10 or 20 amino acids but by no more than 90, 80, 70, 60, 50, 40 or 30 amino acids from amino acids 1-180 of the amino acid sequence of Cas9 of S. pyogenes, S. thermophilus, S. mutans, or Listeria innocua; or

[0617] is identical to amino acids 1-180 of the amino acid sequence of Cas9 of S. pyogenes, S. thermophilus, S. mutans, or L. innocua.

[0618] In an embodiment, a Cas9 molecule or Cas9 polypeptide comprises an amino acid sequence referred to as region 1′:

[0619] having 55%, 60%, 65%, 70%, 75%, 80%, 85%, 90%, 95%, 96%, 97%, 98% or 99% homology with amino acids 120-180 of the amino acid sequence of Cas9 of S. pyogenes, S. thermophilus, S. mutans or L. innocua;

[0620] differs by at least 1, 2, or 5 amino acids but by no more than 35, 30, 25, 20 or 10 amino acids from amino acids 120-180 of the amino acid sequence of Cas9 of S. pyogenes, S. thermophilus, S. mutans, or L. innocua; or

[0621] is identical to amino acids 120-180 of the amino acid sequence of Cas9 of S. pyogenes, S. thermophilus, S. mutans, or L. innocua.

[0622] In an embodiment, a Cas9 molecule or Cas9 polypeptide comprises an amino acid sequence referred to as region 2:

[0623] having 50%, 55%, 60%, 65%, 70%, 75%, 80%, 85%, 90%, 95%, 96%, 97%, 98% or 99% homology with amino acids 360-480 of the amino acid sequence of Cas9 of S. pyogenes, S. thermophilus, S. mutans, or L. innocua;

[0624] differs by at least 1, 2, or 5 amino acids but by no more than 35, 30, 25, 20 or 10 amino acids from amino acids 360-480 of the amino acid sequence of Cas9 of S. pyogenes, S. thermophilus, S. mutans, or L. innocua; or

[0625] is identical to amino acids 360-480 of the amino acid sequence of Cas9 of S. pyogenes, S. thermophilus, S. mutans, or L. innocua.

[0626] In certain embodiments, a Cas9 molecule or Cas9 polypeptide comprises an amino acid sequence referred to as region 3:

[0627] having 55%, 60%, 65%, 70%, 75%, 80%, 85%, 90%, 95%, 96%, 97%, 98%, or 99% homology with amino acids 660-720 of the amino acid sequence of Cas9 of S. pyogenes, S. thermophilus, S. mutans or L. innocua;

[0628] differs by at least 1, 2, or 5 amino acids but by no more than 35, 30, 25, 20 or 10 amino acids from amino acids 660-720 of the amino acid sequence of Cas9 of S. pyogenes, S. thermophilus, S. mutans or L. innocua; or

[0629] is identical to amino acids 660-720 of the amino acid sequence of Cas9 of S. pyogenes, S. thermophilus, S. mutans or L. innocua.

[0630] In an embodiment, a Cas9 molecule or Cas9 polypeptide comprises an amino acid sequence referred to as region 4:

[0631] having 50%, 55%, 60%, 65%, 70%, 75%, 80%, 85%, 90%, 95%, 96%, 97%, 98%, or 99% homology with amino acids 817-900 of the amino acid sequence of Cas9 of S. pyogenes, S. thermophilus, S. mutans, or L. innocua;

[0632] differs by at least 1, 2, or 5 amino acids but by no more than 35, 30, 25, 20 or 10 amino acids from amino acids 817-900 of the amino acid sequence of Cas9 of S. pyogenes, S. thermophilus, S. mutans, or L. innocua; or

[0633] is identical to amino acids 817-900 of the amino acid sequence of Cas9 of S. pyogenes, S. thermophilus, S. mutans, or L. innocua.

[0634] In an embodiment, a Cas9 molecule or Cas9 polypeptide comprises an amino acid sequence referred to as region 5:

[0635] having 50%, 55%, 60%, 65%, 70%, 75%, 80%, 85%, 90%, 95%, 96%, 97%, 98%, or 99% homology with amino acids 900-960 of the amino acid sequence of Cas9 of S. pyogenes, S. thermophilus, S. mutans, or L. innocua;

[0636] differs by at least 1, 2, or 5 amino acids but by no more than 35, 30, 25, 20 or 10 amino acids from amino acids 900-960 of the amino acid sequence of Cas9 of S. pyogenes, S. thermophilus, S. mutans, or L. innocua; or

[0637] is identical to amino acids 900-960 of the amino acid sequence of Cas9 of S. pyogenes, S. thermophilus, S. mutans, or L. innocua.

[0638] Engineered or Altered Cas9 Molecules and Cas9 Polypeptides

[0639] Cas9 molecules and Cas9 polypeptides described herein can possess any of a number of properties, including: nickase activity, nuclease activity (e.g., endonuclease and/or exonuclease activity); helicase activity; the ability to associate functionally with a gRNA molecule; and the ability to target (or localize to) a site on a nucleic acid (e.g., PAM recognition and specificity). In certain embodiments, a Cas9 molecule or Cas9 polypeptide can include all or a subset of these properties. In a typical embodiment, a Cas9 molecule or Cas9 polypeptide has the ability to interact with a gRNA molecule and, in concert with the gRNA molecule, localize to a site in a nucleic acid. Other activities, e.g., PAM specificity, cleavage activity, or helicase activity can vary more widely in Cas9 molecules and Cas9 polypeptides.

[0640] Cas9 molecules include engineered Cas9 molecules and engineered Cas9 polypeptides (engineered, as used in this context, means merely that the Cas9 molecule or Cas9 polypeptide differs from a reference sequences, and implies no process or origin limitation). An engineered Cas9 molecule or Cas9 polypeptide can comprise altered enzymatic properties, e.g., altered nuclease activity, (as compared with a naturally occurring or other reference Cas9 molecule) or altered helicase activity. As discussed herein, an engineered Cas9 molecule or Cas9 polypeptide can have nickase activity (as opposed to double-strand nuclease activity). In an embodiment an engineered Cas9 molecule or Cas9 polypeptide can have an alteration that alters its size, e.g., a deletion of amino acid sequence that reduces its size, e.g., without significant effect on one or more, or any Cas9 activity. In an embodiment, an engineered Cas9 molecule or Cas9 polypeptide can comprise an alteration that affects PAM recognition. For example, an engineered Cas9 molecule can be altered to recognize a PAM sequence other than that recognized by the endogenous wild-type PI domain. In an embodiment a Cas9 molecule or Cas9 polypeptide can differ in sequence from a naturally occurring Cas9 molecule but not have significant alteration in one or more Cas9 activities.

[0641] Cas9 molecules or Cas9 polypeptides with desired properties can be made in a number of ways, e.g., by alteration of a parental, e.g., naturally occurring, Cas9 molecules or Cas9 polypeptides, to provide an altered Cas9 molecule or Cas9 polypeptide having a desired property. For example, one or more mutations or differences relative to a parental Cas9 molecule, e.g., a naturally occurring or engineered Cas9 molecule, can be introduced. Such mutations and differences comprise: substitutions (e.g., conservative substitutions or substitutions of non-essential amino acids); insertions; or deletions. In an embodiment, a Cas9 molecule or Cas9 polypeptide can comprises one or more mutations or differences, e.g., at least 1, 2, 3, 4, 5, 10, 15, 20, 30, 40 or 50 mutations but less than 200, 100, or 80 mutations relative to a reference, e.g., a parental, Cas9 molecule.

[0642] In certain embodiments, a mutation or mutations do not have a substantial effect on a Cas9 activity, e.g., a Cas9 activity described herein. In other embodiments, a mutation or mutations have a substantial effect on a Cas9 activity, e.g., a Cas9 activity described herein.

[0643] Non-Cleaving and Modified-Cleavage Cas9 Molecules and Cas9 Polypeptides

[0644] In an embodiment, a Cas9 molecule or Cas9 polypeptide comprises a cleavage property that differs from naturally occurring Cas9 molecules, e.g., that differs from the naturally occurring Cas9 molecule having the closest homology. For example, a Cas9 molecule or Cas9 polypeptide can differ from naturally occurring Cas9 molecules, e.g., a Cas9 molecule of S. pyogenes, as follows: its ability to modulate, e.g., decreased or increased, cleavage of a double stranded nucleic acid (endonuclease and/or exonuclease activity), e.g., as compared to a naturally occurring Cas9 molecule (e.g., a Cas9 molecule of S. pyogenes); its ability to modulate, e.g., decreased or increased, cleavage of a single-strand of a nucleic acid, e.g., a non-complementary strand of a nucleic acid molecule or a complementary strand of a nucleic acid molecule (nickase activity), e.g., as compared to a naturally occurring Cas9 molecule (e.g., a Cas9 molecule of S. pyogenes); or the ability to cleave a nucleic acid molecule, e.g., a double stranded or single stranded nucleic acid molecule, can be eliminated.

[0645] In certain embodiments, an eaCas9 molecule or eaCas9 polypeptide comprises one or more of the following activities: cleavage activity associated with an N-terminal RuvC-like domain; cleavage activity associated with an HNH-like domain; cleavage activity associated with an HNH-like domain and cleavage activity associated with an N-terminal RuvC-like domain.

[0646] In certain embodiments, an eaCas9 molecule or eaCas9 polypeptide comprises an active, or cleavage competent, HNH-like domain (e.g., an HNH-like domain described herein) and an inactive, or cleavage incompetent, N-terminal RuvC-like domain. An exemplary inactive, or cleavage incompetent N-terminal RuvC-like domain can have a mutation of an aspartic acid in an N-terminal RuvC-like domain, e.g., an aspartic acid at position 10 of SEQ ID NO:2, e.g., can be substituted with an alanine. In an embodiment, the eaCas9 molecule or eaCas9 polypeptide differs from wild-type in the N-terminal RuvC-like domain and does not cleave the target nucleic acid, or cleaves with significantly less efficiency, e.g., less than 20, 10, 5, 1 or 0.1% of the cleavage activity of a reference Cas9 molecule, e.g., as measured by an assay described herein. The reference Cas9 molecule can by a naturally occurring unmodified Cas9 molecule, e.g., a naturally occurring Cas9 molecule such as a Cas9 molecule of S. pyogenes, S. aureus, or S. thermophilus. In an embodiment, the reference Cas9 molecule is the naturally occurring Cas9 molecule having the closest sequence identity or homology.

[0647] In certain embodiments, an eaCas9 molecule or eaCas9 polypeptide comprises an inactive, or cleavage incompetent, HNH domain and an active, or cleavage competent, N-terminal RuvC-like domain (e.g., a RuvC-like domain described herein). Exemplary inactive, or cleavage incompetent HNH-like domains can have a mutation at one or more of: a histidine in an HNH-like domain, for example, at position 856 of the S. pyogenes Cas9 sequence (SEQ ID NO:2), e.g., can be substituted with an alanine; and one or more asparagines in an HNH-like domain, for example, at position 870 and/or 879 of the S. pyogenes Cas9 sequence (SEQ ID NO:2) e.g., can be substituted with an alanine. In an embodiment, the eaCas9 differs from wild-type in the HNH-like domain and does not cleave the target nucleic acid, or cleaves with significantly less efficiency, e.g., less than 20, 10, 5, 1 or 0.1% of the cleavage activity of a reference Cas9 molecule, e.g., as measured by an assay described herein. The reference Cas9 molecule can by a naturally occurring unmodified Cas9 molecule, e.g., a naturally occurring Cas9 molecule such as a Cas9 molecule of S. pyogenes, S. aureus, or S. thermophilus. In an embodiment, the reference Cas9 molecule is the naturally occurring Cas9 molecule having the closest sequence identity or homology.

[0648] In certain embodiments, exemplary Cas9 activities comprise one or more of PAM specificity, cleavage activity, and helicase activity. A mutation(s) can be present, e.g., in: one or more RuvC domains, e.g., an N-terminal RuvC domain; an HNH domain; a region outside the RuvC domains and the HNH domain. In an embodiment, a mutation(s) is present in a RuvC domain. In an embodiment, a mutation(s) is present in an HNH domain. In an embodiment, mutations are present in both a RuvC domain and an HNH domain.

[0649] Exemplary mutations that may be made in the RuvC domain or HNH domain with reference to the S. pyogenes Cas9 sequence include: D10A, E762A, H840A, N854A, N863A and/or D986A. Exemplary mutations that may be made in the RuvC domain with reference to the S. aureus Cas9 sequence include N580A.

[0650] In an embodiment, a Cas9 molecule is an eiCas9 molecule comprising one or more differences in a RuvC domain and/or in an HNH domain as compared to a reference Cas9 molecule, and the eiCas9 molecule does not cleave a nucleic acid, or cleaves with significantly less efficiency than does wild type, e.g., when compared with wild type in a cleavage assay, e.g., as described herein, cuts with less than 50, 25, 10, or 1% of a reference Cas9 molecule, as measured by an assay described herein.

[0651] Whether or not a particular sequence, e.g., a substitution, may affect one or more activity, such as targeting activity, cleavage activity, etc., can be evaluated or predicted, e.g., by evaluating whether the mutation is conservative. In an embodiment, a “non-essential” amino acid residue, as used in the context of a Cas9 molecule, is a residue that can be altered from the wild-type sequence of a Cas9 molecule, e.g., a naturally occurring Cas9 molecule, e.g., an eaCas9 molecule, without abolishing or more preferably, without substantially altering a Cas9 activity (e.g., cleavage activity), whereas changing an “essential” amino acid residue results in a substantial loss of activity (e.g., cleavage activity).

[0652] In an embodiment, a Cas9 molecule comprises a cleavage property that differs from naturally occurring Cas9 molecules, e.g., that differs from the naturally occurring Cas9 molecule having the closest homology. For example, a Cas9 molecule can differ from naturally occurring Cas9 molecules, e.g., a Cas9 molecule of S aureus or S. pyogenes as follows: its ability to modulate, e.g., decreased or increased, cleavage of a double stranded break (endonuclease and/or exonuclease activity), e.g., as compared to a naturally occurring Cas9 molecule (e.g., a Cas9 molecule of S aureus or S. pyogenes); its ability to modulate, e.g., decreased or increased, cleavage of a single-strand of a nucleic acid, e.g., a non-complimentary strand of a nucleic acid molecule or a complementary strand of a nucleic acid molecule (nickase activity), e.g., as compared to a naturally occurring Cas9 molecule (e.g., a Cas9 molecule of S aureus or S. pyogenes); or the ability to cleave a nucleic acid molecule, e.g., a double stranded or single stranded nucleic acid molecule, can be eliminated. In certain embodiments, the nickase is S. aureus Cas9-derived nickase comprising the sequence of SEQ ID NO: 16302 (D10A) or SEQ ID NO: 16303 (N580A) (Friedland 2015).

[0653] In certain embodiments, the altered Cas9 molecule is an eaCas9 molecule comprising one or more of the following activities: cleavage activity associated with a RuvC domain; cleavage activity associated with an HNH domain; cleavage activity associated with an HNH domain and cleavage activity associated with a RuvC domain.

[0654] In an embodiment, the altered Cas9 molecule is an eiCas9 molecule which does not cleave a nucleic acid molecule (either double stranded or single stranded nucleic acid molecules) or cleaves a nucleic acid molecule with significantly less efficiency, e.g., less than 20, 10, 5, 1 or 0.1% of the cleavage activity of a reference Cas9 molecule, e.g., as measured by an assay described herein. The reference Cas9 molecule can be a naturally occurring unmodified Cas9 molecule, e.g., a naturally occurring Cas9 molecule such as a Cas9 molecule of S. pyogenes, S. thermophilus, S. aureus, C. jejuni or N. meningitidis. In an embodiment, the reference Cas9 molecule is the naturally occurring Cas9 molecule having the closest sequence identity or homology. In an embodiment, the eiCas9 molecule lacks substantial cleavage activity associated with a RuvC domain and cleavage activity associated with an HNH domain.

[0655] In certain embodiments, the altered Cas9 molecule or Cas9 polypeptide, e.g., an eaCas9 molecule or eaCas9 polypeptide, can be a fusion, e.g., of two of more different Cas9 molecules, e.g., of two or more naturally occurring Cas9 molecules of different species. For example, a fragment of a naturally occurring Cas9 molecule of one species can be fused to a fragment of a Cas9 molecule of a second species. As an example, a fragment of a Cas9 molecule of S. pyogenes comprising an N-terminal RuvC-like domain can be fused to a fragment of Cas9 molecule of a species other than S. pyogenes (e.g., S. thermophilus) comprising an HNH-like domain.

[0656] Cas9 with Altered or No PAM Recognition

[0657] Naturally-occurring Cas9 molecules can recognize specific PAM sequences, for example the PAM recognition sequences described above for, e.g., S. pyogenes, S. thermophilus, S. mutans, and S. aureus.

[0658] In certain embodiments, a Cas9 molecule or Cas9 polypeptide has the same PAM specificities as a naturally occurring Cas9 molecule. In other embodiments, a Cas9 molecule or Cas9 polypeptide has a PAM specificity not associated with a naturally occurring Cas9 molecule, or a PAM specificity not associated with the naturally occurring Cas9 molecule to which it has the closest sequence homology. For example, a naturally occurring Cas9 molecule can be altered, e.g., to alter PAM recognition, e.g., to alter the PAM sequence that the Cas9 molecule or Cas9 polypeptide recognizes in order to decrease off-target sites and/or improve specificity; or eliminate a PAM recognition requirement. In certain embodiments, a Cas9 molecule or Cas9 polypeptide can be altered, e.g., to increase length of PAM recognition sequence and/or improve Cas9 specificity to high level of identity (e.g., 98%, 99% or 100% match between gRNA and a PAM sequence), e.g., to decrease off-target sites and/or increase specificity. In certain embodiments, the length of the PAM recognition sequence is at least 4, 5, 6, 7, 8, 9, 10 or 15 amino acids in length. In an embodiment, the Cas9 specificity requires at least 90%, 95%, 96%, 97%, 98%, 99% or more homology between the gRNA and the PAM sequence. Cas9 molecules or Cas9 polypeptides that recognize different PAM sequences and/or have reduced off-target activity can be generated using directed evolution. Exemplary methods and systems that can be used for directed evolution of Cas9 molecules are described (see, e.g., Esvelt 2011). Candidate Cas9 molecules can be evaluated, e.g., by methods described below.

[0659] Size-Optimized Cas9 Molecules

[0660] Engineered Cas9 molecules and engineered Cas9 polypeptides described herein include a Cas9 molecule or Cas9 polypeptide comprising a deletion that reduces the size of the molecule while still retaining desired Cas9 properties, e.g., essentially native conformation, Cas9 nuclease activity, and/or target nucleic acid molecule recognition. Provided herein are Cas9 molecules or Cas9 polypeptides comprising one or more deletions and optionally one or more linkers, wherein a linker is disposed between the amino acid residues that flank the deletion. Methods for identifying suitable deletions in a reference Cas9 molecule, methods for generating Cas9 molecules with a deletion and a linker, and methods for using such Cas9 molecules will be apparent to one of ordinary skill in the art upon review of this document.

[0661] A Cas9 molecule, e.g., a S. aureus or S. pyogenes Cas9 molecule, having a deletion is smaller, e.g., has reduced number of amino acids, than the corresponding naturally-occurring Cas9 molecule. The smaller size of the Cas9 molecules allows increased flexibility for delivery methods, and thereby increases utility for genome-editing. A Cas9 molecule can comprise one or more deletions that do not substantially affect or decrease the activity of the resultant Cas9 molecules described herein. Activities that are retained in the Cas9 molecules comprising a deletion as described herein include one or more of the following:

[0662] a nickase activity, i.e., the ability to cleave a single strand, e.g., the non-complementary strand or the complementary strand, of a nucleic acid molecule; a double stranded nuclease activity, i.e., the ability to cleave both strands of a double stranded nucleic acid and create a double stranded break, which in an embodiment is the presence of two nickase activities; an endonuclease activity; an exonuclease activity; a helicase activity, i.e., the ability to unwind the helical structure of a double stranded nucleic acid; and recognition activity of a nucleic acid molecule, e.g., a target nucleic acid or a gRNA molecule.

[0663] Activity of the Cas9 molecules described herein can be assessed using the activity assays described herein or in the art.

[0664] Identifying Regions Suitable for Deletion

[0665] Suitable regions of Cas9 molecules for deletion can be identified by a variety of methods. Naturally-occurring orthologous Cas9 molecules from various bacterial species can be modeled onto the crystal structure of S. pyogenes Cas9 (Nishimasu 2014) to examine the level of conservation across the selected Cas9 orthologs with respect to the three-dimensional conformation of the protein. Less conserved or unconserved regions that are spatially located distant from regions involved in Cas9 activity, e.g., interface with the target nucleic acid molecule and/or gRNA, represent regions or domains are candidates for deletion without substantially affecting or decreasing Cas9 activity.

[0666] Nucleic Acids Encoding Cas9 Molecules

[0667] Nucleic acids encoding the Cas9 molecules or Cas9 polypeptides, e.g., an eaCas9 molecule or eaCas9 polypeptides are provided herein. Exemplary nucleic acids encoding Cas9 molecules or Cas9 polypeptides have been described previously (see, e.g., Cong 2013; Wang 2013; Mali 2013; Jinek 2012).

[0668] In an embodiment, a nucleic acid encoding a Cas9 molecule or Cas9 polypeptide can be a synthetic nucleic acid sequence. For example, the synthetic nucleic acid molecule can be chemically modified, e.g., as described herein. In an embodiment, the Cas9 mRNA has one or more (e.g., all of the following properties: it is capped, polyadenylated, substituted with 5-methylcytidine and/or pseudouridine.

[0669] In addition, or alternatively, the synthetic nucleic acid sequence can be codon optimized, e.g., at least one non-common codon or less-common codon has been replaced by a common codon. For example, the synthetic nucleic acid can direct the synthesis of an optimized messenger mRNA, e.g., optimized for expression in a mammalian expression system, e.g., described herein.

[0670] In addition, or alternatively, a nucleic acid encoding a Cas9 molecule or Cas9 polypeptide may comprise a nuclear localization sequence (NLS). Nuclear localization sequences are known in the art.

[0671] An exemplary codon optimized nucleic acid sequence encoding a Cas9 molecule of S. pyogenes is set forth in SEQ ID NO: 22. The corresponding amino acid sequence of an S. pyogenes Cas9 molecule is set forth in SEQ ID NO: 23.

[0672] Exemplary codon optimized nucleic acid sequence encoding a Cas9 molecule of S. aureus is set forth in SEQ ID NO: 26, 39, 16300 and 16301.

[0673] If any of the above Cas9 sequences are fused with a peptide or polypeptide at the C-terminus, it is understood that the stop codon will be removed.

[0674] Other Cas Molecules and Cas Polypeptides

[0675] Various types of Cas molecules or Cas polypeptides can be used to practice the inventions disclosed herein. In some embodiments, Cas molecules of Type II Cas systems are used. In other embodiments, Cas molecules of other Cas systems are used. For example, Type I or Type III Cas molecules may be used. Exemplary Cas molecules (and Cas systems) have been described previously (see, e.g., Haft 2005; Makarova 2011). Exemplary Cas molecules (and Cas systems) are also shown in Table 4.

TABLE 4
Cas Systems

| | | | Structure of | Families (and | |
|---|---|---|---|---|---|
| | | | encoded protein | superfamily) of | |
| Gene | System type | Name from | (PDB | encoded | |
| name^{‡} | or subtype | Haft 2005^{§} | accessions)^{¶} | protein^{#}** | Representatives |
| cas1 | Type I | cas1 | 3GOD, 3LFX | COG1518 | SERP2463, SPy1047 |
| | Type II | | and 2YZS | | and ygbT |
| | Type III | | | | |
| cas2 | Type I | cas2 | 2IVY, 2I8E and | COG1343 and | SERP2462, SPy1048, |
| | Type II | | 3EXC | COG3512 | SPy1723 (N-terminal |
| | Type III | | | | domain) and ygbF |
| cas3′ | Type I^{‡‡} | cas3 | NA | COG1203 | APE1232 and ygcB |
| cas3″ | Subtype I-A | NA | NA | COG2254 | APE1231 and BH0336 |
| | Subtype I-B | | | | |
| cas4 | Subtype I-A | cas4 and csa1 | NA | COG1468 | APE1239 and BH0340 |
| | Subtype I-B | | | | |
| | Subtype I-C | | | | |
| | Subtype I-D | | | | |
| | Subtype II-B | | | | |
| cas5 | Subtype I-A | cas5a, cas5d, | 3KG4 | COG1688 | APE1234, BH0337, |
| | Subtype I-B | cas5e, cas5h, | | (RAMP) | devS and ygcI |
| | Subtype I-C | cas5p, cas5t | | | |
| | Subtype I-E | and cmx5 | | | |
| cas6 | Subtype I-A | cas6 and cmx6 | 3I4H | COG1583 and | PF1131 and slr7014 |
| | Subtype I-B | | | COG5551 | |
| | Subtype I-D | | | (RAMP) | |
| | Subtype III- | | | | |
| | A Subtype | | | | |
| | III-B | | | | |
| cas6e | Subtype I-E | cse3 | 1WJ9 | (RAMP) | ygcH |
| cas6f | Subtype I-F | csy4 | 2XLJ | (RAMP) | y1727 |
| cas7 | Subtype I-A | csa2, csd2, | NA | COG1857 and | devR and ygcJ |
| | Subtype I-B | cse4, csh2, | | COG3649 | |
| | Subtype I-C | csp1 and cst2 | | (RAMP) | |
| | Subtype I-E | | | | |
| cas8a1 | Subtype I- | cmx1, cst1, | NA | BH0338-like | LA3191^{§§} and |
| | A^{‡‡} | csx8, csx13 | | | PG2018^{§§} |
| | | and CXXC- | | | |
| | | CXXC | | | |
| cas8a2 | Subtype I- | csa4 and csx9 | NA | PH0918 | AF0070, AF1873, |
| | A^{‡‡} | | | | MJ0385, PF0637, |
| | | | | | PH0918 and SSO1401 |
| cas8b | Subtype I- | csh1 and | NA | BH0338-like | MTH1090 and |
| | B^{‡‡} | TM1802 | | | TM1802 |
| cas8c | Subtype I- | csd1 and csp2 | NA | BH0338-like | BH0338 |
| | C^{‡‡} | | | | |
| cas9 | Type II^{‡‡} | csn1 and csx12 | NA | COG3513 | FTN_0757 and |
| | | | | | SPy1046 |
| cas10 | Type III^{‡‡} | cmr2, csm1 | NA | COG1353 | MTH326, Rv2823c^{§§} |
| | | and csx11 | | | and TM1794^{§§} |
| cas10d | Subtype I- | csc3 | NA | COG1353 | slr7011 |
| | D^{‡‡} | | | | |
| csy1 | Subtype I- | csy1 | NA | y1724-like | y1724 |
| | F^{‡‡} | | | | |
| csy2 | Subtype I-F | csy2 | NA | (RAMP) | y1725 |
| csy3 | Subtype I-F | csy3 | NA | (RAMP) | y1726 |
| cse1 | Subtype I- | cse1 | NA | YgcL-like | ygcL |
| | E^{‡‡} | | | | |
| cse2 | Subtype I-E | cse2 | 2ZCA | YgcK-like | ygcK |
| csc1 | Subtype I-D | csc1 | NA | alr1563-like | alr1563 |
| | | | | (RAMP) | |
| csc2 | Subtype I-D | csc1 and csc2 | NA | COG1337 | slr7012 |
| | | | | (RAMP) | |
| csa5 | Subtype I-A | csa5 | NA | AF1870 | AF1870, MJ0380, |
| | | | | | PF0643 and SSO1398 |
| csn2 | Subtype II-A | csn2 | NA | SPy1049-like | SPy1049 |
| csm2 | Subtype III- | csm2 | NA | COG1421 | MTH1081 and |
| | A^{‡‡} | | | | SERP2460 |
| csm3 | Subtype III-A | csc2 and csm3 | NA | COG1337 | MTH1080 and |
| | | | | (RAMP) | SERP2459 |
| csm4 | Subtype III-A | csm4 | NA | COG1567 | MTH1079 and |
| | | | | (RAMP) | SERP2458 |
| csm5 | Subtype III-A | csm5 | NA | COG1332 | MTH1078 and |
| | | | | (RAMP) | SERP2457 |
| csm6 | Subtype III-A | APE2256 and | 2WTE | COG1517 | APE2256 and |
| | | csm6 | | | SSO1445 |
| cmr1 | Subtype III-B | cmr1 | NA | COG1367 | PF1130 |
| | | | | (RAMP) | |
| cmr3 | Subtype III-B | cmr3 | NA | COG1769 | PF1128 |
| | | | | (RAMP) | |
| cmr4 | Subtype III-B | cmr4 | NA | COG1336 | PF1126 |
| | | | | (RAMP) | |
| cmr5 | Subtype III- | cmr5 | 2ZOP and 2OEB | COG3337 | MTH324 and PF1125 |
| | B^{‡‡} | | | | |
| cmr6 | Subtype III-B | cmr6 | NA | COG1604 | PF1124 |
| | | | | (RAMP) | |
| csb1 | Subtype I-U | GSU0053 | NA | (RAMP) | Balac_1306 and |
| | | | | | GSU0053 |
| csb2 | Subtype I- | NA | NA | (RAMP) | Balac_1305 and |
| | U^{§§} | | | | GSU0054 |
| csb3 | Subtype I-U | NA | NA | (RAMP) | Balac_1303^{§§} |
| csx17 | Subtype I-U | NA | NA | NA | Btus_2683 |
| csx14 | Subtype I-U | NA | NA | NA | GSU0052 |
| csx10 | Subtype I-U | csx10 | NA | (RAMP) | Caur_2274 |
| csx16 | Subtype III-U | VVA1548 | NA | NA | VVA1548 |
| csaX | Subtype III-U | csaX | NA | NA | SSO1438 |
| csx3 | Subtype III-U | csx3 | NA | NA | AF1864 |
| csx1 | Subtype III-U | csa3, csx1, | 1XMX and 2I71 | COG1517 and | MJ1666, NE0113, |
| | | csx2, DXTHG, | | COG4006 | PF1127 and TM1812 |
| | | NE0113 and | | | |
| | | TIGR02710 | | | |
| csx15 | Unknown | NA | NA | TTE2665 | TTE2665 |
| csf1 | Type U | csf1 | NA | NA | AFE_1038 |
| csf2 | Type U | csf2 | NA | (RAMP) | AFE_1039 |
| csf3 | Type U | csf3 | NA | (RAMP) | AFE_1040 |
| csf4 | Type U | csf4 | NA | NA | AFE_1037 |

### IV. Functional Analysis of Candidate Molecules

[0676] Candidate Cas9 molecules, candidate gRNA molecules, candidate Cas9 molecule/gRNA molecule complexes, can be evaluated by art-known methods or as described herein. For example, exemplary methods for evaluating the endonuclease activity of Cas9 molecule have been described previously (Jinek 2012).

[0677] Binding and Cleavage Assay: Testing the Endonuclease Activity of Cas9 Molecule

[0678] The ability of a Cas9 molecule/gRNA molecule complex to bind to and cleave a target nucleic acid can be evaluated in a plasmid cleavage assay. In this assay, synthetic or in vitro-transcribed gRNA molecule is pre-annealed prior to the reaction by heating to 95° C. and slowly cooling down to room temperature. Native or restriction digest-linearized plasmid DNA (300 ng (˜8 nM)) is incubated for 60 min at 37° C. with purified Cas9 protein molecule (50-500 nM) and gRNA (50-500 nM, 1:1) in a Cas9 plasmid cleavage buffer (20 mM HEPES pH 7.5, 150 mM KCl, 0.5 mM DTT, 0.1 mM EDTA) with or without 10 mM MgCl₂. The reactions are stopped with 5×DNA loading buffer (30% glycerol, 1.2% SDS, 250 mM EDTA), resolved by a 0.8 or 1% agarose gel electrophoresis and visualized by ethidium bromide staining. The resulting cleavage products indicate whether the Cas9 molecule cleaves both DNA strands, or only one of the two strands. For example, linear DNA products indicate the cleavage of both DNA strands. Nicked open circular products indicate that only one of the two strands is cleaved.

[0679] Alternatively, the ability of a Cas9 molecule/gRNA molecule complex to bind to and cleave a target nucleic acid can be evaluated in an oligonucleotide DNA cleavage assay. In this assay, DNA oligonucleotides (10 pmol) are radiolabeled by incubating with 5 units T4 polynucleotide kinase and ˜3-6 pmol (˜20-40 mCi) [γ-32P]-ATP in 1×T4 polynucleotide kinase reaction buffer at 37° C. for 30 min, in a 50 μL reaction. After heat inactivation (65° C. for 20 min), reactions are purified through a column to remove unincorporated label. Duplex substrates (100 nM) are generated by annealing labeled oligonucleotides with equimolar amounts of unlabeled complementary oligonucleotide at 95° C. for 3 min, followed by slow cooling to room temperature. For cleavage assays, gRNA molecules are annealed by heating to 95° C. for 30 s, followed by slow cooling to room temperature. Cas9 (500 nM final concentration) is pre-incubated with the annealed gRNA molecules (500 nM) in cleavage assay buffer (20 mM HEPES pH 7.5, 100 mM KCl, 5 mM MgCl2, 1 mM DTT, 5% glycerol) in a total volume of 9 μL. Reactions are initiated by the addition of 1 μl target DNA (10 nM) and incubated for 1 h at 37° C. Reactions are quenched by the addition of 20 μL of loading dye (5 mM EDTA, 0.025% SDS, 5% glycerol in formamide) and heated to 95° C. for 5 min. Cleavage products are resolved on 12% denaturing polyacrylamide gels containing 7 M urea and visualized by phosphorimaging. The resulting cleavage products indicate that whether the complementary strand, the non-complementary strand, or both, are cleaved.

[0680] One or both of these assays can be used to evaluate the suitability of a candidate gRNA molecule or candidate Cas9 molecule.

[0681] Binding Assay: Testing the Binding of Cas9 Molecule to Target DNA

[0682] Exemplary methods for evaluating the binding of Cas9 molecule to target DNA have been described previously (Jinek 2012).

[0683] For example, in an electrophoretic mobility shift assay, target DNA duplexes are formed by mixing of each strand (10 nmol) in deionized water, heating to 95° C. for 3 min and slow cooling to room temperature. All DNAs are purified on 8% native gels containing 1×TBE. DNA bands are visualized by UV shadowing, excised, and eluted by soaking gel pieces in DEPC-treated H₂O. Eluted DNA is ethanol precipitated and dissolved in DEPC-treated H₂O. DNA samples are 5′ end labeled with [γ-32P]-ATP using T4 polynucleotide kinase for 30 min at 37° C. Polynucleotide kinase is heat denatured at 65° C. for 20 min, and unincorporated radiolabel is removed using a column. Binding assays are performed in buffer containing 20 mM HEPES pH 7.5, 100 mM KCl, 5 mM MgCl₂, 1 mM DTT and 10% glycerol in a total volume of 10 μL. Cas9 protein molecule is programmed with equimolar amounts of pre-annealed gRNA molecule and titrated from 100 pM to 1 μM. Radiolabeled DNA is added to a final concentration of 20 pM. Samples are incubated for 1 h at 37° C. and resolved at 4° C. on an 8% native polyacrylamide gel containing 1×TBE and 5 mM MgCl₂. Gels are dried and DNA visualized by phosphorimaging.

[0684] Differential Scanning Flourimetry (DSF)

[0685] The thermostability of Cas9 molecule-gRNA ribonucleoprotein (RNP) complexes can be measured via DSF. This technique measures the thermostability of a protein, which can increase under favorable conditions such as the addition of a binding RNA molecule, e.g., a gRNA.

[0686] The assay is performed using two different protocols, one to test the best stoichiometric ratio of gRNA:Cas9 protein and another to determine the best solution conditions for RNP formation.

[0687] To determine the best solution to form RNP complexes, a 2 μM solution of Cas9 in water+10×SYPRO Orange® (Life Technologies cat#S-6650) and dispensed into a 384 well plate. An equimolar amount of gRNA diluted in solutions with varied pH and salt is then added. After incubating at room temperature for 10 min. and brief centrifugation to remove any bubbles, a Bio-Rad CFX384™ Real-Time System C1000 Touch™ Thermal Cycler with the Bio-Rad CFX Manager software is used to run a gradient from 20° C. to 90° C. with a 1° C. increase in temperature every 10 seconds.

[0688] The second assay consists of mixing various concentrations of gRNA with 2 μM Cas 9 in optimal buffer from the assay above and incubating at RT for 10 min in a 384 well plate. An equal volume of optimal buffer+10×SYPRO Orange® (Life Technologies cat#S-6650) is added and the plate sealed with Microseal® B adhesive (MSB-1001). Following brief centrifugation to remove any bubbles, a Bio-Rad CFX384™ Real-Time System C1000 Touch™ Thermal Cycler with the Bio-Rad CFX Manager software is used to run a gradient from 20° C. to 90° C. with a 1° C. increase in temperature every 10 seconds.

[0689] Resection Assay: Testing a Cas9 to Promote Resection

[0690] The ability of a Cas9 to promote resection can be evaluated by measuring the levels of single stranded DNA at specific double strand break sites in human cells using quantitative methods (as described in Zhou 2014). In this assay, a cell line is delivered, e.g., by transfection, a candidate Cas9 or a candidate Cas9 fusion protein. The cells are cultured for a sufficient amount of time to allow nuclease activity and resection to occur. Genomic DNA is carefully extracted using a method in which cells are embedded in low-gelling point agar that protects the DNA from shearing and damage during extraction. The genomic DNA is digested with a restriction enzyme that selectively cuts double-stranded DNA. Primers for quantitative PCR that span up to 5 kb of the double strand break site are designed. The results from the PCR reaction show the levels of single strand DNA detected at each of the primer positions. Thus, the length and the level of resection promoted by the candidate Cas9 or Cas9 fusion protein can be determined from this assay.

[0691] Other qualitative assays for identifying the occurrence of resection include the detection of proteins or protein complexes that bind to single-stranded DNA after resection has occurred, e.g., RPA foci, Rad51 foci, or BrDU detection by immunofluorescence. Antibodies for RPA protein and Rad51 are known in the art.

### V. Genome Editing Approaches

[0692] Mutations in a target gene may be corrected using one of the approaches discussed herein. In an embodiment, a mutation in a target gene is corrected by homology directed repair (HDR) using an exogenously provided template nucleic acid (see Section V.1), referred to herein as “gene correction”. In another embodiment, a mutation in a target gene is corrected by homology directed repair without using an exogenously provided template nucleic acid (see Section V.1), referred to herein as gene correction.

[0693] V.1 HDR Repair and Template Nucleic Acids

[0694] In certain embodiments of the methods provided herein, HDR-mediated sequence alteration is used to alter and/or correct (e.g., repair or edit) the sequence of one or more nucleotides in a genome (e.g., a point mutation at E6 of the HBB gene). While not wishing to be bound by theory, it is believed that HDR-mediated alteration of a target sequence within a target gene (e.g., a HBB gene) occurs by HDR with an exogenously provided donor template or template nucleic acid in a process referred to herein as gene correction. For example, the donor template or template nucleic acid provides for alteration of the target sequence. It is contemplated that a plasmid donor can be used as a template for homologous recombination. It is further contemplated that a single stranded donor template can be used as a template for alteration of the target sequence by alternate methods of HDR (e.g., single-strand annealing) between the target sequence and the donor template. Donor template-effected alteration of a target sequence depends on cleavage by a Cas9 molecule. Cleavage by Cas9 can comprise a double-strand break or two single-strand breaks.

[0695] In other embodiments, HDR-mediated sequence alteration is used to alter and/or correct (e.g., repair or edit) the sequence of one or more nucleotides in a target sequence in a genome without the use of an exogenously provided donor template or template nucleic acid. While not wishing to be bound by theory, it is believed that alteration of the target sequence occurs by HDR with endogenous genomic donor sequence, in a process referred to herein as gene conversion. For example, the endogenous genomic donor sequence provides for alteration of the target sequence. It is contemplated that in an embodiment the endogenous genomic donor sequence is located on the same chromosome as the target sequence. It is further contemplated that in another embodiment the endogenous genomic donor sequence is located on a different chromosome from the target sequence. In certain embodiments, the endogenous genomic donor sequence comprises one or more nucleotides derived from the HBD gene. In other embodiments, the endogenous genomic donor sequence comprises one or more nucleotides derived from the SMN2 gene. In certain embodiments, the endogenous genomic donor sequence comprises one or more nucleotides derived from the p47-PHOX pseudogene. Alteration of a target sequence by endogenous genomic donor sequence depends on cleavage by a Cas9 molecule. Cleavage by Cas9 can comprise a double-strand break or two single-strand breaks.

[0696] In an embodiment, the target position or target position regions has at least 50%, 60%, 70%, 80%, 81%, 82%, 83%, 84%, 85%, 86%, 87%, 88%, 89%, 90%, 91%, 92%, 93%, 94%, 95%, 96%, 97%, 98%, or 99% homology with an endogenous homologous sequence.

[0697] In an embodiment, the target position region, except for the target position, differs by 1, 2, 3, 4, 5, 10, 25, 50, 100 or fewer, nucleotides with an endogenous homologous sequence.

[0698] In an embodiment, the target position region has at least 50%, 60%, 70%, 80%, 90%, 92%, 94%, 96%, 98%, or 99% homology with an endogenous homologous sequence over at least 10, 20, 30, 40, 50, 100, 200, 300, 400, 500, 750, 1,000, 2500, 5000, or 10000 nucleotides.

[0699] In an embodiment, the target position region, except for the target position, differs by 1, 2, 3, 4, 5, 10, 25, 50, 100 or fewer, nucleotides with an endogenous homologous sequence over at least 10, 20, 30, 40, 50, 100, 200, 300, 400, 500, 750, 1,000, 2500, 5000, or 10000 nucleotides.

[0700] In an embodiment, the endogenous homologous sequence comprises a domain, e.g., a catalytic domain, a domain that binds a target, a structural domain, found in the gene that comprises the target position.

[0701] In certain embodiments of the methods provided herein, HDR-mediated alteration is used to alter a single nucleotide in a target sequence. These embodiments may utilize either one double-strand break or two single-strand breaks. In certain embodiments, a single nucleotide alteration is incorporated using (1) one double-strand break, (2) two single-strand breaks, (3) two double-strand breaks with a break occurring on each side of the target position, (4) one double-strand break and two single-strand breaks with the double-strand break and two single-strand breaks occurring on each side of the target position (5) four single-strand breaks with a pair of single stranded breaks occurring on each side of the target position, or (6) one single-strand break.

[0702] In certain embodiments wherein a single-stranded template nucleic acid is used, the target position can be altered by alternative HDR.

[0703] Donor template-effected alteration of a target position depends on cleavage by a Cas9 molecule. Cleavage by Cas9 can comprise a nick, a double-strand break, or two single-strand breaks, e.g., one on each strand of the target nucleic acid. After introduction of the breaks on the target nucleic acid, resection occurs at the break ends resulting in single stranded overhanging DNA regions.

[0704] In canonical HDR, a double-stranded donor template is introduced, comprising homologous sequence to the target nucleic acid that will either be directly incorporated into the target nucleic acid or used as a template to change the sequence of the target nucleic acid. After resection at the break, repair can progress by different pathways, e.g., by the double Holliday junction model (or double-strand break repair, DSBR, pathway) or the synthesis-dependent strand annealing (SDSA) pathway. In the double Holliday junction model, strand invasion by the two single stranded overhangs of the target nucleic acid to the homologous sequences in the donor template occurs, resulting in the formation of an intermediate with two Holliday junctions. The junctions migrate as new DNA is synthesized from the ends of the invading strand to fill the gap resulting from the resection. The end of the newly synthesized DNA is ligated to the resected end, and the junctions are resolved, resulting in the alteration of the target nucleic acid, e.g., incorporation of the altered sequence of the donor template at the corresponding target position. Crossover with the donor template may occur upon resolution of the junctions. In the SDSA pathway, only one single stranded overhang invades the donor template and new DNA is synthesized from the end of the invading strand to fill the gap resulting from resection. The newly synthesized DNA then anneals to the remaining single stranded overhang, new DNA is synthesized to fill in the gap, and the strands are ligated to produce the altered DNA duplex.

[0705] In alternative HDR, a single-strand donor template, e.g., template nucleic acid, is introduced. A nick, single-strand break, or double-strand break at the target nucleic acid, for altering a desired target position, is mediated by a Cas9 molecule, e.g., described herein, and resection at the break occurs to reveal single stranded overhangs. Incorporation of the sequence of the template nucleic acid to correct or alter the target position of the target nucleic acid typically occurs by the SDSA pathway, as described above.

[0706] Additional details on template nucleic acids are provided in Section IV entitled “Template nucleic acids” in International Application PCT/US2014/057905, now published as WO2015/048577, the entire contents of which are expressly incorporated herein by reference.

[0707] Mutations in the HBB gene that can be altered (e.g., corrected) by HDR with a template nucleic acid or with endogenous genomic donor sequence include, e.g., point mutation at E6, e.g., E6V.

[0708] In certain embodiments, double-strand cleavage is effected by a Cas9 molecule having cleavage activity associated with an HNH-like domain and cleavage activity associated with a RuvC-like domain, e.g., an N-terminal RuvC-like domain, e.g., a wild type Cas9. Such embodiments require only a single gRNA molecule.

[0709] In certain embodiments, one single-strand break, or nick, is effected by a Cas9 molecule having nickase activity, e.g., a Cas9 nickase as described herein. A nicked target nucleic acid can be a substrate for alt-HDR.

[0710] In other embodiments, two single-strand breaks, or nicks, are effected by a Cas9 molecule having nickase activity, e.g., cleavage activity associated with an HNH-like domain or cleavage activity associated with an N-terminal RuvC-like domain. Such embodiments usually require two gRNAs, one for placement of each single-strand break. In an embodiment, the Cas9 molecule having nickase activity cleaves the strand to which the gRNA hybridizes, but not the strand that is complementary to the strand to which the gRNA hybridizes. In an embodiment, the Cas9 molecule having nickase activity does not cleave the strand to which the gRNA hybridizes, but rather cleaves the strand that is complementary to the strand to which the gRNA hybridizes.

[0711] In certain embodiments, the nickase has HNH activity, e.g., a Cas9 molecule having the RuvC activity inactivated, e.g., a Cas9 molecule having a mutation at D10, e.g., the D10A mutation. D10A inactivates RuvC; therefore, the Cas9 nickase has (only) HNH activity and will cut on the strand to which the gRNA hybridizes (e.g., the complementary strand, which does not have the NGG PAM on it). In other embodiments, a Cas9 molecule having an H840, e.g., an H840A, mutation can be used as a nickase. H840A inactivates HNH; therefore, the Cas9 nickase has (only) RuvC activity and cuts on the non-complementary strand (e.g., the strand that has the NGG PAM and whose sequence is identical to the gRNA). In other embodiments, a Cas9 molecule having an N863 mutation, e.g., the N863A mutation, mutation can be used as a nickase. N863A inactivates HNH therefore the Cas9 nickase has (only) RuvC activity and cuts on the non-complementary strand (the strand that has the NGG PAM and whose sequence is identical to the gRNA).

[0712] In certain embodiments, in which a nickase and two gRNAs are used to position two single-strand nicks, one nick is on the + strand and one nick is on the − strand of the target nucleic acid. The PAMs can be outwardly facing or inwardly facing. The gRNAs can be selected such that the gRNAs are separated by, from about 0-50, 0-100, or 0-200 nucleotides. In an embodiment, there is no overlap between the target sequences that are complementary to the targeting domains of the two gRNAs. In an embodiment, the gRNAs do not overlap and are separated by as much as 50, 100, or 200 nucleotides. In an embodiment, the use of two gRNAs can increase specificity, e.g., by decreasing off-target binding (Ran 2013).

[0713] In certain embodiments, a single nick can be used to induce HDR, e.g., alt-HDR. It is contemplated herein that a single nick can be used to increase the ratio of HR to NHEJ at a given cleavage site. In certain embodiments, a single-strand break is formed in the strand of the target nucleic acid to which the targeting domain of said gRNA is complementary. In certain embodiments, a single-strand break is formed in the strand of the target nucleic acid other than the strand to which the targeting domain of said gRNA is complementary.

[0714] Placement of Double-Strand or Single-Strand Breaks Relative to the Target Position

[0715] A double-strand break or single-strand break in one of the strands should be sufficiently close to target position that an alteration is produced in the desired region, e.g., correction of a mutation occurs. In certain embodiments, the distance is not more than 50, 100, 200, 300, 350 or 400 nucleotides. While not wishing to be bound by theory, in certain embodiments, it is believed that the break should be sufficiently close to target position such that the target position is within the region that is subject to exonuclease-mediated removal during end resection. If the distance between the target position and a break is too great, the sequence desired to be altered may not be included in the end resection and, therefore, may not be altered, as donor sequence, either exogenously provided donor sequence or endogenous genomic donor sequence, in some embodiments is only used to alter sequence within the end resection region.

[0716] In certain embodiments, the gRNA targeting domain is configured such that a cleavage event, e.g., a double-strand or single-strand break, is positioned within 1, 2, 3, 4, 5, 10, 15, 20, 25, 30, 35, 40, 45, 50, 60, 70, 80, 90, 100, 150 or 200 nucleotides of the region desired to be altered, e.g., a mutation. The break, e.g., a double-strand or single-strand break, can be positioned upstream or downstream of the region desired to be altered, e.g., a mutation. In some embodiments, a break is positioned within the region desired to be altered, e.g., within a region defined by at least two mutant nucleotides. In some embodiments, a break is positioned immediately adjacent to the region desired to be altered, e.g., immediately upstream or downstream of a mutation.

[0717] In certain embodiments, a single-strand break is accompanied by an additional single-strand break, positioned by a second gRNA molecule, as discussed below. For example, the targeting domains bind configured such that a cleavage event, e.g., the two single-strand breaks, are positioned within 1, 2, 3, 4, 5, 10, 15, 20, 25, 30, 35, 40, 45, 50, 60, 70, 80, 90, 100, 150 or 200 nucleotides of a target position. In an embodiment, the first and second gRNA molecules are configured such that when guiding a Cas9 nickase, a single-strand break is accompanied by an additional single-strand break, positioned by a second gRNA, sufficiently close to one another to result in alteration of the desired region. In an embodiment, the first and second gRNA molecules are configured such that a single-strand break positioned by said second gRNA is within 10, 20, 30, 40, or 50 nucleotides of the break positioned by said first gRNA molecule, e.g., when the Cas9 is a nickase. In an embodiment, the two gRNA molecules are configured to position cuts at the same position, or within a few nucleotides of one another, on different strands, e.g., essentially mimicking a double-strand break.

[0718] In certain embodiments, in which a gRNA (unimolecular (or chimeric) or modular gRNA) and Cas9 nuclease induce a double-strand break for the purpose of inducing HDR-mediated alteration, the cleavage site is between 0-200 bp (e.g., 0-175, 0 to 150, 0 to 125, 0 to 100, 0 to 75, 0 to 50, 0 to 25, 25 to 200, 25 to 175, 25 to 150, 25 to 125, 25 to 100, 25 to 75, 25 to 50, 50 to 200, 50 to 175, 50 to 150, 50 to 125, 50 to 100, 50 to 75, 75 to 200, 75 to 175, 75 to 150, 75 to 125, 75 to 100 bp) away from the target position. In certain embodiments, the cleavage site is between 0-100 bp (e.g., 0 to 75, 0 to 50, 0 to 25, 25 to 100, 25 to 75, 25 to 50, 50 to 100, 50 to 75 or 75 to 100 bp) away from the target position.

[0719] In certain embodiments, one can promote HDR by using nickases to generate a break with overhangs. While not wishing to be bound by theory, the single stranded nature of the overhangs can enhance the cell's likelihood of repairing the break by HDR as opposed to, e.g., NHEJ. Specifically, in certain embodiments, HDR is promoted by selecting a first gRNA that targets a first nickase to a first target sequence, and a second gRNA that targets a second nickase to a second target sequence which is on the opposite DNA strand from the first target sequence and offset from the first nick.

[0720] In certain embodiment, the targeting domain of a gRNA molecule is configured to position a cleavage event sufficiently far from a preselected nucleotide, e.g., the nucleotide of a coding region, such that the nucleotide is not altered. In certain embodiments, the targeting domain of a gRNA molecule is configured to position an intronic cleavage event sufficiently far from an intron/exon border, or naturally occurring splice signal, to avoid alteration of the exonic sequence or unwanted splicing events. The gRNA molecule may be a first, second, third and/or fourth gRNA molecule, as described herein.

[0721] Placement of a First Break and a Second Break Relative to Each Other

[0722] In certain embodiments, a double-strand break can be accompanied by an additional double-strand break, positioned by a second gRNA molecule, as is discussed below.

[0723] In certain embodiments, a double-strand break can be accompanied by two additional single-strand breaks, positioned by a second gRNA molecule and a third gRNA molecule.

[0724] In certain embodiments, a first and second single-strand breaks can be accompanied by two additional single-strand breaks positioned by a third gRNA molecule and a fourth gRNA molecule.

[0725] When two or more gRNAs are used to position two or more cleavage events, e.g., double-strand or single-strand breaks, in a target nucleic acid, it is contemplated that the two or more cleavage events may be made by the same or different Cas9 proteins. For example, when two gRNAs are used to position two double stranded breaks, a single Cas9 nuclease may be used to create both double stranded breaks. When two or more gRNAs are used to position two or more single stranded breaks (nicks), a single Cas9 nickase may be used to create the two or more nicks. When two or more gRNAs are used to position at least one double stranded break and at least one single stranded break, two Cas9 proteins may be used, e.g., one Cas9 nuclease and one Cas9 nickase. It is contemplated that when two or more Cas9 proteins are used that the two or more Cas9 proteins may be delivered sequentially to control specificity of a double stranded versus a single stranded break at the desired position in the target nucleic acid.

[0726] In some embodiments, the targeting domain of the first gRNA molecule and the targeting domain of the second gRNA molecules are complementary to opposite strands of the target nucleic acid molecule. In some embodiments, the gRNA molecule and the second gRNA molecule are configured such that the PAMs are oriented outward. In some embodiments, the gRNA molecule and the second gRNA molecule are configured such that the PAMs are oriented inward.

[0727] In certain embodiments, two gRNA are selected to direct Cas9-mediated cleavage at two positions that are a preselected distance from each other. In certain embodiments, the two points of cleavage are on opposite strands of the target nucleic acid. In some embodiments, the two cleavage points form a blunt ended break, and in other embodiments, they are offset so that the DNA ends comprise one or two overhangs (e.g., one or more 5′ overhangs and/or one or more 3′ overhangs). In some embodiments, each cleavage event is a nick. In some embodiments, the nicks are close enough together that they form a break that is recognized by the double stranded break machinery (as opposed to being recognized by, e.g., the SSBr machinery). In certain embodiments, the nicks are far enough apart that they create an overhang that is a substrate for HDR, i.e., the placement of the breaks mimics a DNA substrate that has experienced some resection. For instance, in some embodiments the nicks are spaced to create an overhang that is a substrate for processive resection. In some embodiments, the two breaks are spaced within 25-65 nucleotides of each other. The two breaks may be, e.g., about 25, 30, 35, 40, 45, 50, 55, 60 or 65 nucleotides of each other. The two breaks may be, e.g., at least about 25, 30, 35, 40, 45, 50, 55, 60 or 65 nucleotides of each other. The two breaks may be, e.g., at most about 30, 35, 40, 45, 50, 55, 60 or 65 nucleotides of each other. In embodiments, the two breaks are about 25-30, 30-35, 35-40, 40-45, 45-50, 50-55, 55-60, or 60-65 nucleotides of each other.

[0728] In some embodiments, the break that mimics a resected break comprises a 3′ overhang (e.g., generated by a DSB and a nick, where the nick leaves a 3′ overhang), a 5′ overhang (e.g., generated by a DSB and a nick, where the nick leaves a 5′ overhang), a 3′ and a 5′ overhang (e.g., generated by three cuts), two 3′ overhangs (e.g., generated by two nicks that are offset from each other), or two 5′ overhangs (e.g., generated by two nicks that are offset from each other).

[0729] In certain embodiments, in which two gRNAs (independently, unimolecular (or chimeric) or modular gRNA) complexing with Cas9 nickases induce two single-strand breaks for the purpose of inducing HDR-mediated alteration (e.g., correction), the closer nick is between 0-200 bp (e.g., 0-175, 0 to 150, 0 to 125, 0 to 100, 0 to 75, 0 to 50, 0 to 25, 25 to 200, 25 to 175, 25 to 150, 25 to 125, 25 to 100, 25 to 75, 25 to 50, 50 to 200, 50 to 175, 50 to 150, 50 to 125, 50 to 100, 50 to 75, 75 to 200, 75 to 175, 75 to 150, 75 to 125, or 75 to 100 bp) away from the target position and the two nicks will ideally be within 25-65 bp of each other (e.g., 25 to 50, 25 to 45, 25 to 40, 25 to 35, 25 to 30, 30 to 55, 30 to 50, 30 to 45, 30 to 40, 30 to 35, 35 to 55, 35 to 50, 35 to 45, 35 to 40, 40 to 55, 40 to 50, 40 to 45 bp, 45 to 50 bp, 50 to 55 bp, 55 to 60 bp, or 60 to 65 bp) and no more than 100 bp away from each other (e.g., no more than 90, 80, 70, 60, 50, 40, 30, 20, 10, or 5 bp away from each other). In certain embodiments, the cleavage site is between 0-100 bp (e.g., 0 to 75, 0 to 50, 0 to 25, 25 to 100, 25 to 75, 25 to 50, 50 to 100, 50 to 75, or 75 to 100 bp) away from the target position.

[0730] In some embodiments, two gRNAs, e.g., independently, unimolecular (or chimeric) or modular gRNA, are configured to position a double-strand break on both sides of a target position. In other embodiments, three gRNAs, e.g., independently, unimolecular (or chimeric) or modular gRNA, are configured to position a double-strand break (i.e., one gRNA complexes with a cas9 nuclease) and two single-strand breaks or paired single stranded breaks (i.e., two gRNAs complex with Cas9 nickases) on either side of the target position. In other embodiments, four gRNAs, e.g., independently, unimolecular (or chimeric) or modular gRNA, are configured to generate two pairs of single stranded breaks (i.e., two pairs of two gRNA molecules complex with Cas9 nickases) on either side of the target position. The double-strand break(s) or the closer of the two single-strand nicks in a pair will ideally be within 0-500 bp of the target position (e.g., no more than 450, 400, 350, 300, 250, 200, 150, 100, 50 or 25 bp from the target position). When nickases are used, the two nicks in a pair are, in certain embodiments, within 25-65 bp of each other (e.g., between 25 to 55, 25 to 50, 25 to 45, 25 to 40, 25 to 35, 25 to 30, 50 to 55, 45 to 55, 40 to 55, 35 to 55, 30 to 55, 30 to 50, 35 to 50, 40 to 50, 45 to 50, 35 to 45, 40 to 45 bp, 45 to 50 bp, 50 to 55 bp, 55 to 60 bp, or 60 to 65 bp) and no more than 100 bp away from each other (e.g., no more than 90, 80, 70, 60, 50, 40, 30, 20, or 10 bp).

[0731] When two gRNAs are used to target Cas9 molecules to breaks, different combinations of Cas9 molecules are envisioned. In some embodiments, a first gRNA is used to target a first Cas9 molecule to a first target position, and a second gRNA is used to target a second Cas9 molecule to a second target position. In some embodiments, the first Cas9 molecule creates a nick on the first strand of the target nucleic acid, and the second Cas9 molecule creates a nick on the opposite strand, resulting in a double stranded break (e.g., a blunt ended cut or a cut with overhangs).

[0732] Different combinations of nickases can be chosen to target one single stranded break to one strand and a second single stranded break to the opposite strand. When choosing a combination, one can take into account that there are nickases having one active RuvC-like domain, and nickases having one active HNH domain. In certain embodiments, a RuvC-like domain cleaves the non-complementary strand of the target nucleic acid molecule. In certain embodiments, an HNH-like domain cleaves a single stranded complementary domain, e.g., a complementary strand of a double stranded nucleic acid molecule. Generally, if both Cas9 molecules have the same active domain (e.g., both have an active RuvC domain or both have an active HNH domain), one will choose two gRNAs that bind to opposite strands of the target. In more detail, in some embodiments, a first gRNA is complementary with a first strand of the target nucleic acid and binds a nickase having an active RuvC-like domain and causes that nickase to cleave the strand that is non-complementary to that first gRNA, i.e., a second strand of the target nucleic acid; and a second gRNA is complementary with a second strand of the target nucleic acid and binds a nickase having an active RuvC-like domain and causes that nickase to cleave the strand that is non-complementary to that second gRNA, i.e., the first strand of the target nucleic acid. Conversely, In some embodiments, a first gRNA is complementary with a first strand of the target nucleic acid and binds a nickase having an active HNH domain and causes that nickase to cleave the strand that is complementary to that first gRNA, i.e., a first strand of the target nucleic acid; and a second gRNA is complementary with a second strand of the target nucleic acid and binds a nickase having an active HNH domain and causes that nickase to cleave the strand that is complementary to that second gRNA, i.e., the second strand of the target nucleic acid. In another arrangement, if one Cas9 molecule has an active RuvC-like domain and the other Cas9 molecule has an active HNH domain, the gRNAs for both Cas9 molecules can be complementary to the same strand of the target nucleic acid, so that the Cas9 molecule with the active RuvC-like domain will cleave the non-complementary strand and the Cas9 molecule with the HNH domain will cleave the complementary strand, resulting in a double stranded break.

[0733] In an embodiment, the cleavage event comprises one or more breaks, e.g., one or more single-strand breaks, one or more double-strand breaks, or a combination thereof.

[0734] In an embodiment, the cleavage event comprises any one of the following: (a) one single-strand break; (b) two single-strand breaks; (c) three single-strand breaks; (d) four single-strand breaks; (e) one double-strand break; (f) two double-strand breaks; (g) one single-strand break and one double-strand break; (h) two single-strand breaks and one double-strand break; or (i) any combination thereof.

[0735] In an embodiment, the gRNA molecule and the second gRNA molecule position a cleavage event on each strand of a target nucleic acid.

[0736] In an embodiment, the cleavage event flanks the target position, and wherein the terminus (created by the cleavage event) closest to the target position, for each cleavage event, is a 5′ terminus, e.g., resulting in a 5′ overhang.

[0737] While not wishing to be bound by theory, it believed that, in an embodiment, the sequence exposed by a cleavage event (e.g., a single-strand cleavage event) mediated by a gRNA molecule and a Cas9 molecule (e.g., a Cas9 nickase, e.g., a Cas9 molecule containing D10A or N863A mutation) may affect (e.g., increase or decrease) gene conversion efficiency. For example, the sequence exposed by the cleavage event can include a 5′ overhang, a 3′ overhang, a product of the nucleolytic processing of a 5′ overhang, a product of the nucleolytic processing of a 3′ overhang, or any combination thereof. In an embodiment, the exposed sequence comprises or consists of a 5′ overhang. In another embodiment, the exposed sequence comprises or consists of a 3′ overhang. In an embodiment, the exposed sequence comprises or consists of a product of the nucleolytic processing of a 5′ overhang. In another embodiment, the exposed sequence comprises or consists of a product of the nucleolytic processing of a 3′ overhang.

[0738] In an embodiment, the 5′ overhang is between 1 and 20000 nucleotides, 5 and 20000 nucleotides, 10 and 20000 nucleotides, 20 and 20000 nucleotides, 30 and 20000 nucleotides, between 35 and 20000 nucleotides, between 40 and 20000 nucleotides, between 50 and 20000 nucleotides, between 1000 and 10000 nucleotides, or between 500 and 5000 nucleotides in length, e.g., between 1 and 100 nucleotides, between 1 and 50 nucleotides, between 1 and 25 nucleotides, between 40 and 60 nucleotides, between 40 and 55 nucleotides, or between 45 and 50 nucleotides in length, e.g., at least about 1, 5, 10, 20, 30, 35, 40, 45, 50, 75, 100, 200, 300, 400, 500, 750, 1000, 2000, 3000, 4000, 5000, 6000, 7000, 8000, 9000, 10000, or 15000 nucleotides in length. The sequence exposed by the Cas9 molecule/gRNA molecule mediated cleavage event can constitute a substrate used for homology search in gene conversion.

[0739] By way of example, when a pair of gRNA molecules targets a Cas9 nickase to mediate a cleavage event at a HBB locus, the sequence exposed by said cleavage event can probe any genomic locus for possible homology. While not to be bound by theory, it is believed that, in an embodiment, higher sequence identity of the exposed HBB region with a genomic region can promote gene conversion more effectively. For example, the HBD gene has approximately 92% sequence homology with the HBB gene, therefore the HBD gene may be used as a donor template for effective gene conversion. If the exposed sequence contains a mutation with respect to the HBD sequence, the mutation may decrease gene conversion efficiency. Therefore, different gRNA molecules may give rise to exposed sequences having different homologies to a donor template.

[0740] In an embodiment, the exposed sequence differs by 1, 2, 3, 4, 5, 10, 25, 50, 100 or fewer, nucleotides with an endogenous homologous sequence. In an embodiment, the exposed sequence has at least 50%, 60%, 70%, 80%, 81%, 82%, 83%, 84%, 85%, 86%, 87%, 88%, 89%, 90%, 91%, 92%, 93%, 94%, 95%, 96%, 97%, 98%, or 99% homology with an endogenous homologous sequence over at least 10, 20, 30, 40, 50, 100, 200, 300, 400, 500, 750, 1000, 2500, 5000, or 10000 nucleotides. In an embodiment, the exposed sequence differs by 1, 2, 3, 4, 5, 10, 25, 50, 100 or fewer, nucleotides with an endogenous homologous sequence over at least 10, 20, 30, 40, 50, 100, 200, 300, 400, 500, 750, 1000, 2500, 5000, or 10000 nucleotides.

[0741] In an embodiment, the cleavage event flanks the target position, and the terminus (created by a cleavage event) closest to the target position, for each cleavage event, is a 3′ terminus, e.g., resulting a 3′ overhang.

[0742] In an embodiment, the 3′ overhang is between 1 and 20000 nucleotides, 5 and 20000 nucleotides, 10 and 20000 nucleotides, 20 and 20000 nucleotides, between 30 and 20000 nucleotides, between 35 and 20000 nucleotides, between 40 and 20000 nucleotides, between 50 and 20000 nucleotides, between 1000 and 10000 nucleotides, or between 500 and 5000 nucleotides in length, e.g., between 1 and 100 nucleotides, between 1 and 50 nucleotides, between 1 and 25 nucleotides, between 40 and 60 nucleotides, between 40 and 55 nucleotides, or between 45 and 50 nucleotides in length, e.g., at least about 30, 35, 40, 45, 50, 75, 100, 200, 300, 400, 500, 750, 1000, 2000, 3000, 4000, 5000, 6000, 7000, 8000, 9000, 10000, or 15000 nucleotides in length.

[0743] In an embodiment, the distance between the cleavage event and the target position is between 10 and 10000 nucleotides in length, e.g., between 50 and 5000 nucleotides, between 100 and 1000 nucleotides, between 200 and 800 nucleotides, between 400 and 600 nucleotides, between 100 and 500 nucleotides, or between 500 and 1000 nucleotides in length, e.g., at least about 20, 30, 40, 50, 75, 100, 200, 300, 400, 500, 750, 1000, 2000, 3000, 4000, 5000, 6000, 7000, 8000, 9000, or 10000 nucleotides in length.

[0744] In an embodiment, the cleavage event comprises a single-strand break, and wherein the distance between the single-strand break and the target position is between 10 and 10000 nucleotides in length, e.g., between 50 and 5000 nucleotides, between 100 and 1000 nucleotides, between 200 and 800 nucleotides, between 400 and 600 nucleotides, between 100 and 500 nucleotides, or between 500 and 1000 nucleotides in length, e.g., at least about 20, 30, 40, 50, 75, 100, 200, 300, 400, 500, 750, 1000, 2000, 3000, 4000, 5000, 6000, 7000, 8000, 9000, or 10000 nucleotides in length.

[0745] In an embodiment, the cleavage event comprises two, three or four single-strand breaks, and wherein the distance between each of the single-strand breaks and the target position is between 10 and 10000 nucleotides in length, e.g., between 50 and 5000 nucleotides, between 100 and 1000 nucleotides, between 200 and 800 nucleotides, between 400 and 600 nucleotides, between 100 and 500 nucleotides, or between 500 and 1000 nucleotides in length, e.g., at least about 20, 30, 40, 50, 75, 100, 200, 300, 400, 500, 750, 1000, 2000, 3000, 4000, 5000, 6000, 7000, 8000, 9000, or 10000 nucleotides in length.

[0746] In an embodiment, the cleavage event comprises a double-strand break, and wherein the distance between the double-strand break and the target position is between 10 and 10000 nucleotides in length, e.g., between 50 and 5000 nucleotides, between 100 and 1000 nucleotides, between 200 and 800 nucleotides, between 400 and 600 nucleotides, between 100 and 500 nucleotides, or between 500 and 1000 nucleotides in length, e.g., at least about 20, 30, 40, 50, 75, 100, 200, 300, 400, 500, 750, 1000, 2000, 3000, 4000, 5000, 6000, 7000, 8000, 9000, or 10000 nucleotides in length.

[0747] In an embodiment, the cleavage event comprises two double-strand breaks, and wherein the distance between each of the double-strand breaks and the target position is between 10 and 10000 nucleotides in length, e.g., between 50 and 5000 nucleotides, between 100 and 1000 nucleotides, between 200 and 800 nucleotides, between 400 and 600 nucleotides, between 100 and 500 nucleotides, or between 500 and 1000 nucleotides in length, e.g., at least about 20, 30, 40, 50, 75, 100, 200, 300, 400, 500, 750, 1000, 2000, 3000, 4000, 5000, 6000, 7000, 8000, 9000, or 10000 nucleotides in length.

[0748] In an embodiment, the cleavage event comprises a single-strand break and a double-strand break, wherein the distance between the single-strand break and the target position is between 10 and 10000 nucleotides in length, e.g., between 50 and 5000 nucleotides or between 100 and 1000 nucleotides in length, e.g., about 20, 30, 40, 50, 75, 100, 200, 300, 400, 500, 750, 1000, 2000, 3000, 4000, 5000, 6000, 7000, 8000, 9000, or 10000 nucleotides in length, and

[0749] wherein the distance between the double-strand break and the target position is between 10 and 10000 nucleotides in length, e.g., between 50 and 5000 nucleotides or between 100 and 1000 nucleotides in length, e.g., at least about 20, 30, 40, 50, 75, 100, 200, 300, 400, 500, 750, 1000, 2000, 3000, 4000, 5000, 6000, 7000, 8000, 9000, or 10000 nucleotides in length.

[0750] In an embodiment, the cleavage event comprises two single-strand breaks and a double-strand break,

[0751] wherein the distance between each of the single-strand breaks and the target position is between 10 and 10000 nucleotides in length, e.g., between 50 and 5000 nucleotides or between 100 and 1000 nucleotides in length, e.g., about 20, 30, 40, 50, 75, 100, 200, 300, 400, 500, 750, 1000, 2000, 3000, 4000, 5000, 6000, 7000, 8000, 9000, or 10000 nucleotides in length, and

[0752] wherein the distance between the double-strand break and the target position is between 10 and 10000 nucleotides in length, e.g., between 50 and 5000 nucleotides or between 100 and 1000 nucleotides in length, e.g., at least about 20, 30, 40, 50, 75, 100, 200, 300, 400, 500, 750, 1000, 2000, 3000, 4000, 5000, 6000, 7000, 8000, 9000, or 10000 nucleotides in length.

[0753] In an embodiment, the cleavage event comprises two or more single-strand breaks, two or more double-strand breaks, or two single-strand breaks and one double-strand breaks,

[0754] wherein the distance between any of the two breaks that are present on the same strand is between 30 and 20000 nucleotides, 40 and 20000 nucleotides, or 50 and 20000 nucleotides in length, e.g., between 1000 and 10000 nucleotides or between 500 and 5000 nucleotides in length, e.g., between 40 and 60 nucleotides, between 40 and 55 nucleotides, or between 45 and 50 nucleotides in length, e.g., at least about 30, 35, 40, 45, 50, 75, 100, 200, 300, 400, 500, 750, 1000, 2000, 3000, 4000, 5000, 6000, 7000, 8000, 9000, 10000, or 15000 nucleotides in length.

[0755] In an embodiment, the cleavage event comprises two or more single-strand breaks, two or more double-strand breaks, or two single-strand breaks and one double-strand breaks,

[0756] wherein the distance between at least two breaks that are present on different strands is between 30 and 20000 nucleotides, 40 and 20000 nucleotides, or 50 and 20000 nucleotides in length, e.g., between 1000 and 10000 nucleotides or between 500 and 5000 nucleotides in length, e.g., between 40 and 60 nucleotides, between 40 and 55 nucleotides, or between 45 and 50 nucleotides in length, e.g., at least about 30, 35, 40, 45, 50, 75, 100, 200, 300, 400, 500, 750, 1000, 2000, 3000, 4000, 5000, 6000, 7000, 8000, 9000, 10000, or 15000 nucleotides in length.

[0757] In an embodiment, the cleavage event comprises two single-strand breaks, wherein the distance between the two single breaks is between 30 and 20000 nucleotides, 40 and 20000 nucleotides, or 50 and 20000 nucleotides in length, e.g., between 1000 and 10000 nucleotides or between 500 and 5000 nucleotides in length, e.g., between 40 and 60 nucleotides, between 40 and 55 nucleotides, or between 45 and 50 nucleotides in length, e.g., at least about 30, 35, 40, 45, 50, 75, 100, 200, 300, 400, 500, 750, 1000, 2000, 3000, 4000, 5000, 6000, 7000, 8000, 9000, 10000, or 15000 nucleotides in length. In an embodiment, the single-strand breaks are present on different strands. In another embodiment, the single-strand breaks are present on the same strand. In an embodiment, the cleavage event further comprises one or more (e.g., two) of single-strand break, double-strand break, or both.

[0758] In an embodiment, the Cas9 molecule comprises HNH-like domain cleavage activity but has no, or no significant, N-terminal RuvC-like domain cleavage activity. In an embodiment, the eaCas9 molecule is an HNH-like domain nickase, e.g., the Cas9 molecule comprises a mutation at D10, e.g., D10A. In another embodiment, the eaCas9 molecule comprises N-terminal RuvC-like domain cleavage activity but has no, or no significant, HNH-like domain cleavage activity. In an embodiment, the Cas9 molecule is an N-terminal RuvC-like domain nickase, e.g., the eaCas9 molecule comprises a mutation at N863, e.g., N863A.

[0759] In an embodiment, the first gRNA molecule positions a cleavage event on a strand that does not bind to the first gRNA molecule.

[0760] In an embodiment, the second gRNA molecule positions a cleavage event on a strand that does not bind to the second gRNA molecule.

[0761] In an embodiment, the first gRNA molecule positions a cleavage event on a strand that does not bind to the first gRNA and the second gRNA molecule positions a cleavage event on a strand that does not bind to the second gRNA molecule, and wherein the gRNA molecule and the second gRNA molecule bind to different strands, e.g., resulting in a 3′ overhang on each strand.

[0762] In an embodiment, the first gRNA molecule positions a cleavage event 5′ to the target position on the first strand. In an embodiment, the first gRNA molecule positions a cleavage event 5′ to the target position on the first strand, as shown in the diagram below:

[chemical structure]

[0763] wherein X is the cleavage event and M is the target position.

[0764] In an embodiment, the second gRNA molecule positions a cleavage event 3′ to the target position (relative to the target position on the first strand) on the second strand. In an embodiment, the second gRNA molecule positions a cleavage event 3′ to the target position (relative to the target position on the first strand) on the second strand, as shown in the diagram below:

[chemical structure]

[0765] wherein X is the cleavage event and M is the target position.

[0766] In an embodiment, the second gRNA molecule positions a cleavage event 5′ to the target position on the second strand. In an embodiment, the second gRNA molecule positions a cleavage event 5′ to the target position on the second strand, as shown in the diagram below:

[chemical structure]

[0767] wherein X is the cleavage event and M is the target position.

[0768] In an embodiment, the first gRNA molecule positions a cleavage event 5′ to the target position on the first strand, and wherein the second gRNA molecule positions a cleavage event 3′ to the target position (relative to the target position on the first strand) on the second strand. In an embodiment, the first gRNA molecule positions a cleavage event 5′ to the target position on the first strand, and wherein the second gRNA molecule positions a cleavage event 3′ to the target position (relative to the target position on the first strand) on the second strand, as shown in the diagram below:

[chemical structure]

[0769] wherein X is the cleavage event and M is the target position.

[0770] In an embodiment, the first gRNA molecule positions a cleavage event 3′ to the target position on the first strand. In an embodiment, the first gRNA molecule positions a cleavage event 3′ to the target position on the first strand, as shown in the diagram below:

[chemical structure]

[0771] wherein X is the cleavage event and M is the target position.

[0772] In an embodiment, the second gRNA molecule positions a cleavage event 5′ to the target position (relative to the target position on the first strand) on the second strand. In an embodiment, the second gRNA molecule positions a cleavage event 5′ to the target position (relative to the target position on the first strand) on the second strand, as shown in the diagram below:

[chemical structure]

[0773] wherein X is the cleavage event and M is the target position.

[0774] In an embodiment, the first gRNA molecule positions a cleavage event 3′ to the target position on the first strand, and wherein the second gRNA molecule positions a cleavage event 5′ to the target position (relative to the target position on the first strand) on the second strand. In an embodiment, the first gRNA molecule positions a cleavage event 3′ to the target position on the first strand, and wherein the second gRNA molecule positions a cleavage event 5′ to the target position (relative to the target position on the first strand) on the second strand, as shown in the diagram below:

[chemical structure]

[0775] wherein X is the cleavage event and M is the target position.

[0776] In an embodiment, the first gRNA molecule positions a cleavage event 5′ to the target position on the first strand, and wherein the second gRNA molecule positions a cleavage event 5′ to the target position (relative to the target position on the first strand) on the second strand, e.g., to produce a 5′ overhang. In an embodiment, the first gRNA molecule positions a cleavage event 5′ to the target position on the first strand, and wherein the second gRNA molecule positions a cleavage event 5′ to the target position (relative to the target position on the first strand) on the second strand, e.g., to produce a 5′ overhang, as shown in the diagram below:

[chemical structure]

[0777] wherein X is the cleavage event and M is the target position.

[0778] In an embodiment, the first gRNA molecule positions a cleavage event 3′ to the target position on the first strand, and wherein the second gRNA molecule positions a cleavage event 3′ to the target position (relative to the target position on the first strand) on the second strand, e.g., to produce a 5′ overhang. In an embodiment, the first gRNA molecule positions a cleavage event 3′ to the target position on the first strand, and wherein the second gRNA molecule positions a cleavage event 3′ to the target position (relative to the target position on the first strand) on the second strand, e.g., to produce a 5′ overhang, as shown in the diagram below:

[chemical structure]

[0779] wherein X is the cleavage event and M is the target position.

[0780] In an embodiment, the first gRNA molecule positions a cleavage event 5′ to the target position on the first strand, and wherein the second gRNA molecule positions a cleavage event 5′ to the target position (relative to the target position on the first strand) on the second strand, e.g., to produce a 3′ overhang. In an embodiment, the first gRNA molecule positions a cleavage event 5′ to the target position on the first strand, and wherein the second gRNA molecule positions a cleavage event 5′ to the target position (relative to the target position on the first strand) on the second strand, e.g., to produce a 3′ overhang, as shown in the diagram below:

[chemical structure]

[0781] wherein X is the cleavage event and M is the target position.

[0782] In an embodiment, the first gRNA molecule positions a cleavage event 3′ to the target position on the first strand, and wherein the second gRNA molecule positions a cleavage event 3′ to the target position (relative to the target position on the first strand) on the second strand, e.g., to produce a 3′ overhang. In an embodiment, the first gRNA molecule positions a cleavage event 3′ to the target position on the first strand, and wherein the second gRNA molecule positions a cleavage event 3′ to the target position (relative to the target position on the first strand) on the second strand, e.g., to produce a 3′ overhang, as shown in the diagram below:

[chemical structure]

[0783] wherein X is the cleavage event and M is the target position.

[0784] In one embodiment, the target position comprises a mutation. In one embodiment, the mutation is associated with a disease phenotype.

[0785] In an embodiment, the first gRNA molecule positions a cleavage event on a strand that binds to the gRNA molecule.

[0786] In an embodiment, the second gRNA molecule positions a cleavage event on a strand that binds to the second gRNA molecule.

[0787] In an embodiment, the first gRNA molecule positions a cleavage event on a strand that binds to the gRNA and the second gRNA molecule positions a cleavage event on a strand that binds to the second gRNA molecule, and wherein the first gRNA molecule and the second gRNA molecule bind to different strands, e.g., resulting in a 5′ overhang on each strand.

[0788] In an embodiment, the gRNA molecule, together with the Cas9 molecule (e.g., a nickase), positions a cleavage event on a strand (e.g., a first strand or a second strand),

[0789] In an embodiment, the gRNA molecule positions a cleavage event 5′ to the target position on the first strand. This embodiment allows the use of a single Cas9 molecule, e.g., a single Cas9 molecule that is a nickase (e.g., a Cas9 molecule with a D10A mutation), e.g., to place a single-strand cleavage event sufficiently close to the target position (e.g., within 10000, 9000, 8000, 7000, 6000, 5000, 4000, 3000, 2000, 1000, 800, 600, 500, 400, 300, 200, 100, 75, 50, 40, 30, 20, 10, 5, or 1 bp to the target position). For example, this embodiment can be illustrated as shown in the diagram below:

[chemical structure]

[0790] wherein X is the cleavage event, M is the target position.

[0791] In an embodiment, the gRNA molecule positions a cleavage event 3′ to the target position (relative to the target position on the first strand) on the second strand. This embodiment allows the use of a single Cas9 molecule, e.g., a single Cas9 molecule that is a nickase (e.g., a Cas9 molecule with a D10A mutation), e.g., to place a single-strand cleavage event sufficiently close to the target position (e.g., within 10000, 9000, 8000, 7000, 6000, 5000, 4000, 3000, 2000, 1000, 800, 600, 500, 400, 300, 200, 100, 75, 50, 40, 30, 20, 10, 5, or 1 bp to the target position). For example, this embodiment can be illustrated as shown in the diagram below:

[chemical structure]

[0792] wherein X is the cleavage event, M is the target position.

[0793] In an embodiment, the gRNA molecule positions a cleavage event 3′ to the target position on the first strand. This embodiment allows the use of a single Cas9 molecule, e.g., a single Cas9 molecule that is a nickase (e.g., a Cas9 molecule with a D10A mutation), e.g., to place a single-strand cleavage event sufficiently close to the target position (e.g., within 10000, 9000, 8000, 7000, 6000, 5000, 4000, 3000, 2000, 1000, 800, 600, 500, 400, 300, 200, 100, 75, 50, 40, 30, 20, 10, 5, or 1 bp to the target position). For example, this embodiment can be illustrated as shown in the diagram below:

[chemical structure]

[0794] wherein X is the cleavage event, M is the target position.

[0795] In an embodiment, the gRNA molecule positions a cleavage event 5′ to the target position (relative to the target position on the first strand) on the second strand. This embodiment allows the use of a single Cas9 molecule, e.g., a single Cas9 molecule that is a nickase (e.g., a Cas9 molecule with a D10A mutation), e.g., to place a single-strand cleavage event sufficiently close to the target position (e.g., within 10000, 9000, 8000, 7000, 6000, 5000, 4000, 3000, 2000, 1000, 800, 600, 500, 400, 300, 200, 100, 75, 50, 40, 30, 20, 10, 5, or 1 bp to the target position). For example, this embodiment can be illustrated as shown in the diagram below:

[chemical structure]

[0796] wherein X is the cleavage event, M is the target position.

[0797] In an embodiment, the gRNA molecule positions a cleavage event 5′ to the target position on the first strand. This embodiment allows the use of a single Cas9 molecule, e.g., a single Cas9 molecule that is a nickase (e.g., a Cas9 molecule with an N863A mutation), e.g., to place a single-strand cleavage event sufficiently close to the target position (e.g., within 10000, 9000, 8000, 7000, 6000, 5000, 4000, 3000, 2000, 1000, 800, 600, 500, 400, 300, 200, 100, 75, 50, 40, 30, 20, 10, 5, or 1 bp to the target position). For example, this embodiment can be illustrated as shown in the diagram below:

[chemical structure]

[0798] wherein X is the cleavage event, M is the target position.

[0799] In an embodiment, the gRNA molecule positions a cleavage event 3′ to the target position (relative to the target position on the first strand) on the second strand. This embodiment allows the use of a single Cas9 molecule, e.g., a single Cas9 molecule that is a nickase (e.g., a Cas9 molecule with an N863A mutation), e.g., to place a single-strand cleavage event sufficiently close to the target position (e.g., within 10000, 9000, 8000, 7000, 6000, 5000, 4000, 3000, 2000, 1000, 800, 600, 500, 400, 300, 200, 100, 75, 50, 40, 30, 20, 10, 5, or 1 bp to the target position). For example, this embodiment can be illustrated as shown in the diagram below:

[chemical structure]

[0800] wherein X is the cleavage event, M is the target position.

[0801] In an embodiment, the gRNA molecule positions a cleavage event 3′ to the target position on the first strand. This embodiment allows the use of a single Cas9 molecule, e.g., a single Cas9 molecule that is a nickase (e.g., a Cas9 molecule with an N863A mutation), e.g., to place a single-strand cleavage event sufficiently close to the target position (e.g., within 10000, 9000, 8000, 7000, 6000, 5000, 4000, 3000, 2000, 1000, 800, 600, 500, 400, 300, 200, 100, 75, 50, 40, 30, 20, 10, 5, or 1 bp to the target position). For example, this embodiment can be illustrated as shown in the diagram below:

[chemical structure]

[0802] wherein X is the cleavage event, M is the target position.

[0803] In an embodiment, the gRNA molecule positions a cleavage event 5′ to the target position (relative to the target position on the first strand) on the second strand. This embodiment allows the use of a single Cas9 molecule, e.g., a single Cas9 molecule that is a nickase (e.g., a Cas9 molecule with an N863A mutation), e.g., to place a single-strand cleavage event sufficiently close to the target position (e.g., within 10000, 9000, 8000, 7000, 6000, 5000, 4000, 3000, 2000, 1000, 800, 600, 500, 400, 300, 200, 100, 75, 50, 40, 30, 20, 10, 5, or 1 bp to the target position). For example, this embodiment can be illustrated as shown in the diagram below:

[chemical structure]

[0804] wherein X is the cleavage event, M is the target position.

[0805] In an embodiment the gRNA molecule, together with the Cas9 molecule (e.g., a nickase), positions a cleavage event on the strand that binds to the gRNA molecule; and the second gRNA molecule, together with the Cas9 molecule, positions a cleavage event on the strand that binds to the second gRNA molecule, wherein the gRNA molecule and the second gRNA molecule bind to different strands, the gRNA molecule positions a cleavage event 5′ to the target position on the first strand, and the second gRNA molecule positions a cleavage event 3′ to the target position (relative to the target position on the first strand) on the second strand. This embodiment allows the use of a single Cas9 molecule, e.g., a single Cas9 molecule that is a nickase (e.g., a Cas9 molecule with a D10A mutation), e.g., to place single-strand cleavage events on each side of the target position.

[0806] For example, this embodiment can be illustrated as shown in the diagram below:

[chemical structure]

[0807] wherein X is the cleavage event, M is the target position.

[0808] In an embodiment, the cleavage event positioned by the gRNA molecule and the cleavage event positioned by the second gRNA molecule are separated by 10 to 10000, 10 to 5000, 10 to 2500, 10 to 1000, 10 to 750, 10 to 500, 10 to 400, 10 to 300, 10 to 200, 10 to 100, 10 to 75, 10 to 50, or 10 to 25 base pairs.

[0809] In an embodiment:

[0810] the gRNA molecule, together with the Cas9 molecule (a nickase), positions a cleavage event on the strand other than the strand that binds to the gRNA molecule; and

[0811] the second gRNA molecule, together with the Cas9 molecule, positions a cleavage event on the strand other than the strand that binds to the second gRNA molecule,

[0812] wherein:

[0813] the gRNA molecule and the second gRNA molecule bind to different strands,

[0814] the gRNA molecule positions a cleavage event 5′ to the target position on the first strand, and

[0815] the second gRNA molecule positions a cleavage event 3′ to the target position (relative to the target position on the first strand) on the second strand. This embodiment allows the use of a single Cas9 molecule, e.g., a single Cas9 molecule that is a nickase (e.g., a Cas9 molecule with an N863A mutation), e.g., to place single-strand cleavage events on each side of the target position.

[0816] For example, this embodiment can be illustrated as shown in the diagram below:

[chemical structure]

[0817] wherein X is the cleavage event and M is the target position.

[0818] In an embodiment, the cleavage event positioned by the gRNA molecule and the cleavage event positioned by the second gRNA molecule are separated by 10 to 10000, 10 to 5000, 10 to 2500, 10 to 1000, 10 to 750, 10 to 500, 10 to 400, 10 to 300, 10 to 200, 10 to 100, 10 to 75, 10 to 50, or 10 to 25 base pairs.

[0819] In an embodiment:

[0820] the gRNA molecule, together with the Cas9 molecule (a nickase), positions a cleavage event on the strand that binds to the gRNA molecule; and

[0821] the second gRNA molecule, together with the Cas9 molecule, positions a cleavage event on the strand that binds to the second gRNA molecule,

[0822] wherein:

[0823] the gRNA molecule and the second gRNA molecule bind to different strands,

[0824] the gRNA molecule positions a cleavage event 3′ to the target position on the first strand, and

[0825] the second gRNA molecule positions a cleavage event 5′ to the target position (relative to the target position on the first strand) on the second strand. This embodiment allows the use of a single Cas9 molecule, e.g., a single Cas9 molecule that is a nickase (e.g., a Cas9 molecule with a D10A mutation), e.g., to place single-strand cleavage events on each side of the target position.

[0826] For example, this embodiment can be illustrated as shown in the diagram below:

[chemical structure]

[0827] wherein X is the cleavage event and M is the target position.

[0828] In an embodiment, the cleavage event positioned by the gRNA molecule and the cleavage event positioned by the second gRNA molecule are separated by 10 to 10000, 10 to 5000, 10 to 2500, 10 to 1000, 10 to 750, 10 to 500, 10 to 400, 10 to 300, 10 to 200, 10 to 100, 10 to 75, 10 to 50, or 10 to 25 base pairs.

[0829] In an embodiment:

[0830] the gRNA molecule, together with the Cas9 molecule (a nickase), positions a cleavage event on the strand other than the strand that binds to the gRNA molecule; and

[0831] the second gRNA molecule, together with the Cas9 molecule, positions a cleavage event on the strand other than the strand that binds to the second gRNA molecule,

[0832] wherein:

[0833] the gRNA molecule and the second gRNA molecule bind to different strands,

[0834] the gRNA molecule positions a cleavage event 3′ to the target position on the first strand, and

[0835] the second gRNA molecule positions a cleavage event 5′ to the target position (relative to the target position on the first strand) on the second strand. This embodiment allows the use of a single Cas9 molecule, e.g., a single Cas9 molecule that is a nickase (e.g., a Cas9 molecule with a N863A mutation), e.g., to place single-strand cleavage events on each side of the target position.

[0836] For example, this embodiment can be illustrated as shown in the diagram below:

[chemical structure]

[0837] wherein X is the cleavage event and M is the target position.

[0838] In an embodiment, the cleavage event positioned by the gRNA molecule and the cleavage event positioned by the second gRNA molecule are separated by 10 to 10000, 10 to 5000, 10 to 2500, 10 to 1000, 10 to 750, 10 to 500, 10 to 400, 10 to 300, 10 to 200, 10 to 100, 10 to 75, 10 to 50, or 10 to 25 base pairs.

[0839] In an embodiment:

[0840] the gRNA molecule, together with the Cas9 molecule (e.g., a nickase), positions a cleavage event on the strand that binds to the gRNA molecule; and

[0841] the second gRNA molecule, together with the Cas9 molecule, positions a cleavage event on the strand that binds to the second gRNA molecule,

[0842] wherein:

[0843] the gRNA molecule and the second gRNA molecule bind to different strands,

[0844] the gRNA molecule positions a cleavage event 5′ to the target position on the first strand, and

[0845] the second gRNA molecule positions a cleavage event 5′ to the target position (relative to the target position on the first strand) on the second strand, e.g., to produce a 5′ overhang. This embodiment allows the use of a single Cas9 molecule, e.g., a single Cas9 molecule that is a nickase (e.g., a Cas9 molecule with a D10A mutation), e.g., to place single-strand cleavage events on one side of the target position, e.g., to produce a 5′ overhang.

[0846] For example, this embodiment can be illustrated as shown in the diagram below:

[chemical structure]

[0847] wherein X is the cleavage event and M is the target position.

[0848] In an embodiment, the cleavage event positioned by the gRNA molecule and the cleavage event positioned by the second gRNA molecule are separated by 10 to 10000, 10 to 5000, 10 to 2500, 10 to 1000, 10 to 750, 10 to 500, 10 to 400, 10 to 300, 10 to 200, 10 to 100, 10 to 75, 10 to 50, or 10 to 25 base pairs.

[0849] In an embodiment:

[0850] the gRNA molecule, together with the Cas9 molecule (a nickase), positions a cleavage event on the strand other than the strand that binds to the gRNA molecule; and

[0851] the second gRNA molecule, together with the Cas9 molecule, positions a cleavage event on the strand other than the strand that binds to the second gRNA molecule,

[0852] wherein:

[0853] the gRNA molecule and the second gRNA molecule bind to different strands,

[0854] the gRNA molecule positions a cleavage event 5′ to the target position on the first strand, and

[0855] the second gRNA molecule positions a cleavage event 5′ to the target position (relative to the target position on the first strand) on the second strand, e.g., to produce a 5′ overhang. This embodiment allows the use of a single Cas9 molecule, e.g., a single Cas9 molecule that is a nickase (e.g., a Cas9 molecule with an N863A mutation), e.g., to place single-strand cleavage events on each side of the target position, e.g., to produce a 5′ overhang.

[0856] For example, this embodiment can be illustrated as shown in the diagram below:

[chemical structure]

[0857] wherein X is the cleavage event and M is the target position.

[0858] In an embodiment, the cleavage event positioned by the gRNA molecule and the cleavage event positioned by the second gRNA molecule are separated by 10 to 10000, 10 to 5000, 10 to 2500, 10 to 1000, 10 to 750, 10 to 500, 10 to 400, 10 to 300, 10 to 200, 10 to 100, 10 to 75, 10 to 50, or 10 to 25 base pairs.

[0859] In an embodiment:

[0860] the gRNA molecule, together with the Cas9 molecule (e.g., a nickase), positions a cleavage event on the strand that binds to the gRNA molecule; and

[0861] the second gRNA molecule, together with the Cas9 molecule, positions a cleavage event on the strand that binds to the second gRNA molecule,

[0862] wherein:

[0863] the gRNA molecule and the second gRNA molecule bind to different strands,

[0864] the gRNA molecule positions a cleavage event 3′ to the target position on the first strand, and

[0865] the second gRNA molecule positions a cleavage event 3′ to the target position (relative to the target position on the first strand) on the second strand, e.g., to produce a 5′ overhang. This embodiment allows the use of a single Cas9 molecule, e.g., a single Cas9 molecule that is a nickase (e.g., a Cas9 molecule with a D10A mutation), e.g., to place single-strand cleavage events on one side of the target position, e.g., to produce a 5′ overhang.

[0866] For example, this embodiment can be illustrated as shown in the diagram below:

[chemical structure]

[0867] wherein X is the cleavage event and M is the target position.

[0868] In an embodiment, the cleavage event positioned by the gRNA molecule and the cleavage event positioned by the second gRNA molecule are separated by 10 to 10000, 10 to 5000, 10 to 2500, 10 to 1000, 10 to 750, 10 to 500, 10 to 400, 10 to 300, 10 to 200, 10 to 100, 10 to 75, 10 to 50, or 10 to 25 base pairs.

[0869] In an embodiment:

[0870] the gRNA molecule, together with the Cas9 molecule (a nickase), positions a cleavage event on the strand other than the strand that binds to the gRNA molecule; and

[0871] the second gRNA molecule, together with the Cas9 molecule, positions a cleavage event on the strand other than the strand that binds to the second gRNA molecule,

[0872] wherein:

[0873] the gRNA molecule and the second gRNA molecule bind to different strands,

[0874] the gRNA molecule positions a cleavage event 3′ to the target position on the first strand, and

[0875] the second gRNA molecule positions a cleavage event 3′ to the target position (relative to the target position on the first strand) on the second strand, e.g., to produce a 5′ overhang. This embodiment allows the use of a single Cas9 molecule, e.g., a single Cas9 molecule that is a nickase (e.g., a Cas9 molecule with an N863A mutation), e.g., to place single-strand cleavage events on each side of the target position, e.g., to produce a 5′ overhang.

[0876] For example, this embodiment can be illustrated as shown in the diagram below:

[chemical structure]

[0877] wherein X is the cleavage event and M is the target position.

[0878] In an embodiment, the cleavage event positioned by the gRNA molecule and the cleavage event positioned by the second gRNA molecule are separated by 10 to 10000, 10 to 5000, 10 to 2500, 10 to 1000, 10 to 750, 10 to 500, 10 to 400, 10 to 300, 10 to 200, 10 to 100, 10 to 75, 10 to 50, or 10 to 25 base pairs.

[0879] In an embodiment:

[0880] the gRNA molecule, together with the Cas9 molecule (e.g., a nickase), positions a cleavage event on the strand that binds to the gRNA molecule; and

[0881] the second gRNA molecule, together with the Cas9 molecule, positions a cleavage event on the strand that binds to the second gRNA molecule,

[0882] wherein:

[0883] the gRNA molecule and the second gRNA molecule bind to different strands,

[0884] the gRNA molecule positions a cleavage event 5′ to the target position on the first strand, and

[0885] the second gRNA molecule positions a cleavage event 5′ to the target position (relative to the target position on the first strand) on the second strand, e.g., to produce a 3′ overhang. This embodiment allows the use of a single Cas9 molecule, e.g., a single Cas9 molecule that is a nickase (e.g., a Cas9 molecule with a D10A mutation), e.g., to place single-strand cleavage events on one side of the target position, e.g., to produce a 3′ overhang.

[0886] For example, this embodiment can be illustrated as shown in the diagram below:

[chemical structure]

[0887] wherein X is the cleavage event and M is the target position.

[0888] In an embodiment, the cleavage event positioned by the gRNA molecule and the cleavage event positioned by the second gRNA molecule are separated by 10 to 10000, 10 to 5000, 10 to 2500, 10 to 1000, 10 to 750, 10 to 500, 10 to 400, 10 to 300, 10 to 200, 10 to 100, 10 to 75, 10 to 50, or 10 to 25 base pairs.

[0889] In an embodiment:

[0890] the gRNA molecule, together with the Cas9 molecule (a nickase), positions a cleavage event on the strand other than the strand that binds to the gRNA molecule; and

[0891] the second gRNA molecule, together with the Cas9 molecule, positions a cleavage event on the strand other than the strand that binds to the second gRNA molecule,

[0892] wherein:

[0893] the gRNA molecule and the second gRNA molecule bind to different strands,

[0894] the gRNA molecule positions a cleavage event 5′ to the target position on the first strand, and

[0895] the second gRNA molecule positions a cleavage event 5′ to the target position (relative to the target position on the first strand) on the second strand, e.g., to produce a 3′ overhang. This embodiment allows the use of a single Cas9 molecule, e.g., a single Cas9 molecule that is a nickase (e.g., a Cas9 molecule with an N863A mutation), e.g., to place single-strand cleavage events on each side of the target position, e.g., to produce a 3′ overhang.

[0896] For example, this embodiment can be illustrated as shown in the diagram below:

[chemical structure]

[0897] wherein X is the cleavage event and M is the target position.

[0898] In an embodiment, the cleavage event positioned by the gRNA molecule and the cleavage event positioned by the second gRNA molecule are separated by 10 to 10000, 10 to 5000, 10 to 2500, 10 to 1000, 10 to 750, 10 to 500, 10 to 400, 10 to 300, 10 to 200, 10 to 100, 10 to 75, 10 to 50, or 10 to 25 base pairs.

[0899] In an embodiment:

[0900] the gRNA molecule, together with the Cas9 molecule (e.g., a nickase), positions a cleavage event on the strand that binds to the gRNA molecule; and

[0901] the second gRNA molecule, together with the Cas9 molecule, positions a cleavage event on the strand that binds to the second gRNA molecule,

[0902] wherein:

[0903] the gRNA molecule and the second gRNA molecule bind to different strands,

[0904] the gRNA molecule positions a cleavage event 3′ to the target position on the first strand, and

[0905] the second gRNA molecule positions a cleavage event 3′ to the target position (relative to the target position on the first strand) on the second strand, e.g., to produce a 3′ overhang. This embodiment allows the use of a single Cas9 molecule, e.g., a single Cas9 molecule that is a nickase (e.g., a Cas9 molecule with a D10A mutation), e.g., to place single-strand cleavage events on one side of the target position, e.g., to produce a 3′ overhang.

[0906] For example, this embodiment can be illustrated as shown in the diagram below:

[chemical structure]

[0907] wherein X is the cleavage event and M is the target position.

[0908] In an embodiment, the cleavage event positioned by the gRNA molecule and the cleavage event positioned by the second gRNA molecule are separated by 10 to 10000, 10 to 5000, 10 to 2500, 10 to 1000, 10 to 750, 10 to 500, 10 to 400, 10 to 300, 10 to 200, 10 to 100, 10 to 75, 10 to 50, or 10 to 25 base pairs.

[0909] In an embodiment:

[0910] the gRNA molecule, together with the Cas9 molecule (a nickase), positions a cleavage event on the strand other than the strand that binds to the gRNA molecule; and

[0911] the second gRNA molecule, together with the Cas9 molecule, positions a cleavage event on the strand other than the strand that binds to the second gRNA molecule,

[0912] wherein:

[0913] the gRNA molecule and the second gRNA molecule bind to different strands,

[0914] the gRNA molecule positions a cleavage event 3′ to the target position on the first strand, and

[0915] the second gRNA molecule positions a cleavage event 3′ to the target position (relative to the target position on the first strand) on the second strand, e.g., to produce a 3′ overhang. This embodiment allows the use of a single Cas9 molecule, e.g., a single Cas9 molecule that is a nickase (e.g., a Cas9 molecule with an N863A mutation), e.g., to place single-strand cleavage events on each side of the target position, e.g., to produce a 3′ overhang.

[0916] For example, this embodiment can be illustrated as shown in the diagram below:

[chemical structure]

[0917] wherein X is the cleavage event and M is the target position.

[0918] In an embodiment, the cleavage event positioned by the gRNA molecule and the cleavage event positioned by the second gRNA molecule are separated by 10 to 10000, 10 to 5000, 10 to 2500, 10 to 1000, 10 to 750, 10 to 500, 10 to 400, 10 to 300, 10 to 200, 10 to 100, 10 to 75, 10 to 50, or 10 to 25 base pairs.

### Homology Arms of the Donor Template

[0919] A homology arm should extend at least as far as the region in which end resection may occur, e.g., in order to allow the resected single stranded overhang to find a complementary region within the donor template. The overall length could be limited by parameters such as plasmid size or viral packaging limits. In an embodiment, a homology arm does not extend into repeated elements, e.g., Alu repeats or LINE repeats.

[0920] Exemplary homology arm lengths include at least 50, 100, 250, 500, 750, 1000, 2000, 3000, 4000, or 5000 nucleotides. In some embodiments, the homology arm length is 50-100, 100-250, 250-500, 500-750, 750-1000, 1000-2000, 2000-3000, 3000-4000, or 4000-5000 nucleotides.

[0921] Target position, as used herein, refers to a site on a target nucleic acid (e.g., the chromosome) that is modified by a Cas9 molecule-dependent process. For example, the target position can be a modified Cas9 molecule cleavage of the target nucleic acid and template nucleic acid directed modification, e.g., correction, of the target position. In an embodiment, a target position can be a site between two nucleotides, e.g., adjacent nucleotides, on the target nucleic acid into which one or more nucleotides is added. The target position may comprise one or more nucleotides that are altered, e.g., corrected, by a template nucleic acid. In an embodiment, the target position is within a target sequence (e.g., the sequence to which the gRNA binds). In an embodiment, a target position is upstream or downstream of a target sequence (e.g., the sequence to which the gRNA binds).

[0922] A template nucleic acid, as that term is used herein, refers to a nucleic acid sequence which can be used in conjunction with a Cas9 molecule and a gRNA molecule to alter the structure of a target position. In certain embodiments, the target nucleic acid is modified to have the some or all of the sequence of the template nucleic acid, typically at or near cleavage site(s). In an embodiment, the template nucleic acid is single stranded. In certain embodiments, the template nucleic acid is double stranded. In certain embodiments, the template nucleic acid is DNA, e.g., double stranded DNA. In other embodiments, the template nucleic acid is single stranded DNA. In certain embodiments, the template nucleic acid is encoded on the same vector backbone, e.g., AAV genome, plasmid DNA, as the Cas9 and gRNA. In an embodiment, the template nucleic acid is excised from a vector backbone in vivo, e.g., it is flanked by gRNA recognition sequences. In certain embodiments, the template nucleic acid comprises endogenous genomic sequence.

[0923] In certain embodiments, the template nucleic acid alters the structure of the target position by participating in an HDR event. In certain embodiments, the template nucleic acid alters the sequence of the target position. In certain embodiments, the template nucleic acid results in the incorporation of a modified, or non-naturally occurring base into the target nucleic acid.

[0924] Typically, the template sequence undergoes a breakage mediated or catalyzed recombination with the target sequence. In certain embodiments, the template nucleic acid includes sequence that corresponds to a site on the target sequence that is cleaved by an eaCas9 mediated cleavage event. In certain embodiments, the template nucleic acid includes sequence that corresponds to both, a first site on the target sequence that is cleaved in a first Cas9 mediated event, and a second site on the target sequence that is cleaved in a second Cas9 mediated event.

[0925] In an embodiment, the template nucleic acid can include sequence which results in an alteration in the coding sequence of a translated sequence, e.g., one which results in the substitution of one amino acid for another in a protein product, e.g., transforming a mutant allele into a wild type allele, transforming a wild type allele into a mutant allele, and/or introducing a stop codon, insertion of an amino acid residue, deletion of an amino acid residue, or a nonsense mutation.

[0926] In other embodiments, the template nucleic acid can include sequence which results in an alteration in a non-coding sequence, e.g., an alteration in an exon or in a 5′ or 3′ non-translated or non-transcribed region. Such alterations include an alteration in a control element, e.g., a promoter, enhancer, and an alteration in a cis-acting or trans-acting control element.

[0927] A template nucleic acid having homology with a target position in the HBB gene can be used to alter the structure of a target sequence (e.g., to correct a mutation present in a target position of an endogenous HBB gene). The template sequence can be used to alter an unwanted structure, e.g., an unwanted or mutant nucleotide.

[0928] A template nucleic acid typically comprises the following components:

[0929] [5′ homology arm]-[replacement sequence]-[3′ homology arm].

[0930] The homology arms provide for recombination into the chromosome, thus replacing the undesired element, e.g., a mutation or signature, with the replacement sequence. In certain embodiments, the homology arms flank the most distal cleavage sites.

[0931] In certain embodiments, the 3′ end of the 5′ homology arm is the position next to the 5′ end of the replacement sequence. In an embodiment, the 5′ homology arm can extend at least 10, 20, 30, 40, 50, 100, 200, 300, 400, 500, 600, 700, 800, 900, 1000, 1500, 2000, 3000, 4000, or 5000 nucleotides 5′ from the 5′ end of the replacement sequence.

[0932] In certain embodiments, the 5′ end of the 3′ homology arm is the position next to the 3′ end of the replacement sequence. In certain embodiments, the 3′ homology arm can extend at least 10, 20, 30, 40, 50, 100, 200, 300, 400, 500, 600, 700, 800, 900, 1000, 1500, 2000, 3000, 4000, or 5000 nucleotides 3′ from the 3′ end of the replacement sequence.

[0933] In certain embodiments, to alter one or more nucleotides at a target position (e.g., to correct a mutation), the homology arms, e.g., the 5′ and 3′ homology arms, may each comprise about 1000 bp of sequence flanking the most distal gRNAs (e.g., 1000 bp of sequence on either side of the target position (e.g., the mutation).

[0934] It is contemplated herein that one or both homology arms may be shortened to avoid including certain sequence repeat elements, e.g., Alu repeats or LINE elements. For example, a 5′ homology arm may be shortened to avoid a sequence repeat element. In other embodiments, a 3′ homology arm may be shortened to avoid a sequence repeat element. In some embodiments, both the 5′ and the 3′ homology arms may be shortened to avoid including certain sequence repeat elements.

[0935] It is contemplated herein that template nucleic acids for altering the sequence (e.g., correcting a mutation) of a target position may be designed for use as a single-stranded oligonucleotide, e.g., a single-stranded oligodeoxynucleotide (ssODN). When using a ssODN, 5′ and 3′ homology arms may range up to about 200 bp in length, e.g., at least 25, 50, 75, 100, 125, 150, 175, or 200 bp in length. Longer homology arms are also contemplated for ssODNs as improvements in oligonucleotide synthesis continue to be made. In some embodiments, a longer homology arm is made by a method other than chemical synthesis, e.g., by denaturing a long double stranded nucleic acid and purifying one of the strands, e.g., by affinity for a strand-specific sequence anchored to a solid substrate.

[0936] While not wishing to be bound by theory, in certain embodiments alt-HDR proceeds more efficiently when the template nucleic acid has extended homology 5′ to the nick (i.e., in the 5′ direction of the nicked strand). Accordingly, in some embodiments, the template nucleic acid has a longer homology arm and a shorter homology arm, wherein the longer homology arm can anneal 5′ of the nick. In some embodiments, the arm that can anneal 5′ to the nick is at least 25, 50, 75, 100, 125, 150, 175, or 200, 300, 400, 500, 600, 700, 800, 900, 1000, 1500, 2000, 3000, 4000, or 5000 nucleotides from the nick or the 5′ or 3′ end of the replacement sequence. In some embodiments, the arm that can anneal 5′ to the nick is at least 10%, 20%, 30%, 40%, or 50% longer than the arm that can anneal 3′ to the nick. In some embodiments, the arm that can anneal 5′ to the nick is at least 2×, 3×, 4×, or 5× longer than the arm that can anneal 3′ to the nick. Depending on whether a ssDNA template can anneal to the intact strand or the nicked strand, the homology arm that anneals 5′ to the nick may be at the 5′ end of the ssDNA template or the 3′ end of the ssDNA template, respectively.

[0937] Similarly, in some embodiments, the template nucleic acid has a 5′ homology arm, a replacement sequence, and a 3′ homology arm, such that the template nucleic acid has extended homology to the 5′ of the nick. For example, the 5′ homology arm and 3′ homology arm may be substantially the same length, but the replacement sequence may extend farther 5′ of the nick than 3′ of the nick. In some embodiments, the replacement sequence extends at least 10%, 20%, 30%, 40%, 50%, 2×, 3×, 4×, or 5× further to the 5′ end of the nick than the 3′ end of the nick.

[0938] While not wishing to be bound by theory, In some embodiments, alt-HDR proceeds more efficiently when the template nucleic acid is centered on the nick. Accordingly, in some embodiments, the template nucleic acid has two homology arms that are essentially the same size. For instance, the first homology arm of a template nucleic acid may have a length that is within 10%, 9%, 8%, 7%, 6%, 5%, 4%, 3%, 2%, or 1% of the second homology arm of the template nucleic acid.

[0939] Similarly, in some embodiments, the template nucleic acid has a 5′ homology arm, a replacement sequence, and a 3′ homology arm, such that the template nucleic acid extends substantially the same distance on either side of the nick. For example, the homology arms may have different lengths, but the replacement sequence may be selected to compensate for this. For example, the replacement sequence may extend further 5′ from the nick than it does 3′ of the nick, but the homology arm 5′ of the nick is shorter than the homology arm 3′ of the nick, to compensate. The converse is also possible, e.g., that the replacement sequence may extend further 3′ from the nick than it does 5′ of the nick, but the homology arm 3′ of the nick is shorter than the homology arm 5′ of the nick, to compensate.

[0940] Exemplary Template Nucleic Acids

[0941] In a preferred embodiment, and in order to increase DNA repair via gene conversion, the template nucleic acid is an endogenous homologous region. In certain embodiments, the template nucleic acid is double stranded. In other embodiments, the template nucleic acid is single stranded. In certain embodiments, the template nucleic acid comprises a single stranded portion and a double stranded portion. In certain embodiments, the template nucleic acid comprises about 50 to 100, e.g., 55 to 95, 60 to 90, 65 to 85, or 70 to 80 bp, homology on either side of the nick and/or replacement sequence. In certain embodiments, the template nucleic acid comprises about 50, 55, 60, 65, 70, 75, 80, 85, 90, 95, or 100 bp homology 5′ of the nick or replacement sequence, 3′ of the nick or replacement sequence, or both 5′ and 3′ of the nick or replacement sequences.

[0942] In certain embodiments, the template nucleic acid comprises about 150 to 200 bp, e.g., 155 to 195, 160 to 190, 165 to 185, or 170 to 180 bp, homology 3′ of the nick and/or replacement sequence. In certain embodiments, the template nucleic acid comprises about 150, 155, 160, 165, 170, 175, 180, 185, 190, 195, or 200 bp homology 3′ of the nick or replacement sequence. In some embodiments, the template nucleic acid comprises less than about 100, 90, 80, 70, 60, 50, 40, 30, 20, 15, or 10 bp homology 5′ of the nick or replacement sequence.

[0943] In certain embodiments, the template nucleic acid comprises about 150 to 200 bp, e.g., 155 to 195, 160 to 190, 165 to 185, or 170 to 180 bp, homology 5′ of the nick and/or replacement sequence. In certain embodiments, the template nucleic acid comprises about 150, 155, 160, 165, 170, 175, 180, 185, 190, 195, or 200 bp homology 5′ of the nick or replacement sequence. In certain embodiments, the template nucleic acid comprises less than about 100, 90, 80, 70, 60, 50, 40, 30, 20, 15, or 10 bp homology 3′ of the nick or replacement sequence.

[0944] In certain embodiments, the template nucleic acid comprises a nucleotide sequence, e.g., of one or more nucleotides, that will be added to or will template a change in the target nucleic acid. In other embodiments, the template nucleic acid comprises a nucleotide sequence that may be used to modify the target position. In other embodiments, the template nucleic acid comprises a nucleotide sequence, e.g., of one or more nucleotides, that corresponds to wild type sequence of the target nucleic acid, e.g., of the target position.

[0945] The template nucleic acid may comprise a replacement sequence. In some embodiments, the template nucleic acid comprises a 5′ homology arm. In some embodiments, the template nucleic acid comprises a 3′ homology arm.

[0946] In certain embodiments, the template nucleic acid is linear double stranded DNA. The length may be, e.g., about 150-200 bp, e.g., about 150, 160, 170, 180, 190, or 200 bp. The length may be, e.g., at least 150, 160, 170, 180, 190, or 200 bp. In some embodiments, the length is no greater than 150, 160, 170, 180, 190, or 200 bp. In some embodiments, a double stranded template nucleic acid has a length of about 160 bp, e.g., about 155-165, 150-170, 140-180, 130-190, 120-200, 110-210, 100-220, 90-230, or 80-240 bp.

[0947] The template nucleic acid can be linear single stranded DNA. In certain embodiments, the template nucleic acid is (i) linear single stranded DNA that can anneal to the nicked strand of the target nucleic acid, (ii) linear single stranded DNA that can anneal to the intact strand of the target nucleic acid, (iii) linear single stranded DNA that can anneal to the plus strand of the target nucleic acid, (iv) linear single stranded DNA that can anneal to the minus strand of the target nucleic acid, or more than one of the preceding. The length may be, e.g., about 150-200 nucleotides, e.g., about 150, 160, 170, 180, 190, or 200 nucleotides. The length may be, e.g., at least 150, 160, 170, 180, 190, or 200 nucleotides. In some embodiments, the length is no greater than 150, 160, 170, 180, 190, or 200 nucleotides. In some embodiments, a single stranded template nucleic acid has a length of about 160 nucleotides, e.g., about 155-165, 150-170, 140-180, 130-190, 120-200, 110-210, 100-220, 90-230, or 80-240 nucleotides.

[0948] In some embodiments, the template nucleic acid is circular double stranded DNA, e.g., a plasmid. In some embodiments, the template nucleic acid comprises about 500 to 1000 bp of homology on either side of the replacement sequence and/or the nick. In some embodiments, the template nucleic acid comprises about 300, 400, 500, 600, 700, 800, 900, 1000, 1500, or 2000 bp of homology 5′ of the nick or replacement sequence, 3′ of the nick or replacement sequence, or both 5′ and 3′ of the nick or replacement sequence. In some embodiments, the template nucleic acid comprises at least 300, 400, 500, 600, 700, 800, 900, 1000, 1500, or 2000 bp of homology 5′ of the nick or replacement sequence, 3′ of the nick or replacement sequence, or both 5′ and 3′ of the nick or replacement sequence. In some embodiments, the template nucleic acid comprises no more than 300, 400, 500, 600, 700, 800, 900, 1000, 1500, or 2000 bp of homology 5′ of the nick or replacement sequence, 3′ of the nick or replacement sequence, or both 5′ and 3′ of the nick or replacement sequence.

[0949] In certain embodiments, one or both homology arms may be shortened to avoid including certain sequence repeat elements, e.g., Alu repeats, LINE elements. For example, a 5′ homology arm may be shortened to avoid a sequence repeat element, while a 3′ homology arm may be shortened to avoid a sequence repeat element. In some embodiments, both the 5′ and the 3′ homology arms may be shortened to avoid including certain sequence repeat elements.

[0950] In some embodiments, the template nucleic acid is an adenovirus vector, e.g., an AAV vector, e.g., a ssDNA molecule of a length and sequence that allows it to be packaged in an AAV capsid. The vector may be, e.g., less than 5 kb and may contain an ITR sequence that promotes packaging into the capsid. The vector may be integration-deficient. In some embodiments, the template nucleic acid comprises about 150 to 1000 nucleotides of homology on either side of the replacement sequence and/or the nick. In some embodiments, the template nucleic acid comprises about 100, 150, 200, 300, 400, 500, 600, 700, 800, 900, 1000, 1500, or 2000 nucleotides 5′ of the nick or replacement sequence, 3′ of the nick or replacement sequence, or both 5′ and 3′ of the nick or replacement sequence. In some embodiments, the template nucleic acid comprises at least 100, 150, 200, 300, 400, 500, 600, 700, 800, 900, 1000, 1500, or 2000 nucleotides 5′ of the nick or replacement sequence, 3′ of the nick or replacement sequence, or both 5′ and 3′ of the nick or replacement sequence. In some embodiments, the template nucleic acid comprises at most 100, 150, 200, 300, 400, 500, 600, 700, 800, 900, 1000, 1500, or 2000 nucleotides 5′ of the nick or replacement sequence, 3′ of the nick or replacement sequence, or both 5′ and 3′ of the nick or replacement sequence.

[0951] In some embodiments, the template nucleic acid is a lentiviral vector, e.g., an IDLV (integration deficiency lentivirus). In some embodiments, the template nucleic acid comprises about 500 to 1000 base pairs of homology on either side of the replacement sequence and/or the nick. In some embodiments, the template nucleic acid comprises about 300, 400, 500, 600, 700, 800, 900, 1000, 1500, or 2000 bp of homology 5′ of the nick or replacement sequence, 3′ of the nick or replacement sequence, or both 5′ and 3′ of the nick or replacement sequence. In some embodiments, the template nucleic acid comprises at least 300, 400, 500, 600, 700, 800, 900, 1000, 1500, or 2000 bp of homology 5′ of the nick or replacement sequence, 3′ of the nick or replacement sequence, or both 5′ and 3′ of the nick or replacement sequence. In some embodiments, the template nucleic acid comprises no more than 300, 400, 500, 600, 700, 800, 900, 1000, 1500, or 2000 bp of homology 5′ of the nick or replacement sequence, 3′ of the nick or replacement sequence, or both 5′ and 3′ of the nick or replacement sequence.

[0952] In an embodiment, the template nucleic acid comprises one or more mutations, e.g., silent mutations, that prevent Cas9 from recognizing and cleaving the template nucleic acid. The template nucleic acid may comprise, e.g., at least 1, 2, 3, 4, 5, 10, 20, 30, 40, or 50 silent mutations relative to the corresponding sequence in the genome of the cell to be altered. In certain embodiments, the template nucleic acid comprises at most 2, 3, 4, 5, 10, 20, 30, 40, or 50 silent mutations relative to the corresponding sequence in the genome of the cell to be altered. In an embodiment, the template nucleic acid comprises one or more mutations, e.g., silent mutations that prevent Cas9 from recognizing and cleaving the template nucleic acid. The template nucleic acid may comprise, e.g., at least 1, 2, 3, 4, 5, 10, 20, 30, 40, or 50 silent mutations relative to the corresponding sequence in the genome of the cell to be altered. In certain embodiments, the template nucleic acid comprises at most 2, 3, 4, 5, 10, 20, 30, 40, or 50 silent mutations relative to the corresponding sequence in the genome of the cell to be altered.

[0953] In certain embodiments, the template nucleic acid alters the structure of the target position by participating in an HDR event. In some embodiments, the template nucleic acid alters the sequence of the target position. In some embodiments, the template nucleic acid results in the incorporation of a modified, or non-naturally occurring nucleotide base into the target nucleic acid.

[0954] Typically, the template sequence undergoes a breakage mediated or catalyzed recombination with the target sequence. In some embodiments, the template nucleic acid includes sequence that corresponds to a site on the target sequence that is cleaved by an eaCas9 mediated cleavage event. In some embodiments, the template nucleic acid includes sequence that corresponds to both, a first site on the target sequence that is cleaved in a first Cas9 mediated event, and a second site on the target sequence that is cleaved in a second Cas9 mediated event.

[0955] In some embodiments, the template nucleic acid can include sequence which results in an alteration in the coding sequence of a translated sequence, e.g., one which results in the substitution of one amino acid for another in a protein product, e.g., transforming a mutant allele into a wild type allele, transforming a wild type allele into a mutant allele, and/or introduction of a stop codon, insertion of an amino acid residue, deletion of an amino acid residue, or a nonsense mutation.

[0956] In some embodiments, the template nucleic acid can include sequence which results in an alteration in a non-coding sequence, e.g., an alteration in an exon or in a 5′ or 3′ non-translated or non-transcribed region. Such alterations include an alteration in a control element, e.g., a promoter or enhancer, or an alteration in a cis-acting or trans-acting control element.

[0957] In some embodiments, a template nucleic acid having homology with a target position can be used to alter the structure of a target sequence. The template nucleic acid sequence can be used to alter an unwanted structure, e.g., an unwanted or mutant nucleotide.

[0958] Exemplary template nucleic acids (also referred to herein as donor constructs) to correction a mutation, e.g., at E6, e.g., E6V, in the HBB gene, are provided.

[0959] Suitable sequence for a 5′ homology arm can be selected from (e.g., includes a portion of) or include the nucleic acid sequence of SEQ ID NO: 16257 (5′H arm).

[0960] Suitable sequence for the 3′ homology arm can be selected from (e.g., includes a portion of) or include the nucleic acid sequence of SEQ ID NO: 16258 (3′H arm).

[0961] In some embodiments, the replacement sequence comprises or consists of an adenine (A) residue to correct the amino acid sequence to a glutamic acid (E) residue.

[0962] In some embodiments, to correct a mutation, e.g., at E6, e.g., E6V, in the HBB gene, the homology arms, e.g., the 5′ and 3′ homology arms, may each comprise about 1000 base pairs (bp) of sequence flanking the most distal gRNAs (e.g., 1100 bp of sequence on either side of the mutation). The 5′ homology arm is shown as bold sequence, codon 6 is shown as underlined sequence, the inserted base to correct the mutation at E6, e.g., E6V, is shown as boxed sequence, and the 3′ homology arm is shown as no emphasis sequence:

(Template Construct 1; SEQ ID NO: 16259)
ATAGGAACTTGAATCAAGGAAATGATTTTAAAACGCAGTATTCTTAGTGGACTAGAGGA
AAAAAATAATCTGAGCCAAGTAGAAGACCTTTTCCCCTCCTACCCCTACTTTCTAAGTC
ACAGAGGCTTTTTGTTCCCCCAGACACTCTTGCAGATTAGTCCAGGCAGAAACAGTTAG
ATGTCCCCAGTTAACCTCCTATTTGACACCACTGATTACCCCATTGATAGTCACACTTT
GGGTTGTAAGTGACTTTTTATTTATTTGTATTTTTGACTGCATTAAGAGGTCTCTAGTTT
TTTATCTCTTGTTTCCCAAAACCTAATAAGTAACTAATGCACAGAGCACATTGATTTGT
ATTTATTCTATTTTTAGACATAATTTATTAGCATGCATGAGCAAATTAAGAAAAACAACA
ACAAATGAATGCATATATATGTATATGTATGTGTGTATATATACACACATATATATATAT
ATTTTTTCTTTTCTTACCAGAAGGTTTTAATCCAAATAAGGAGAAGATATGCTTAGAAC
CGAGGTAGAGTTTTCATCCATTCTGTCCTGTAAGTATTTTGCATATTCTGGAGACGCAG
GAAGAGATCCATCTACATATCCCAAAGCTGAATTATGGTAGACAAAACTCTTCCACTTT
TAGTGCATCAACTTCTTATTTGTGTAATAAGAAAATTGGGAAAACGATCTTCAATATGC
TTACCAAGCTGTGATTCCAAATATTACGTAAATACACTTGCAAAGGAGGATGTTTTTAG
TAGCAATTTGTACTGATGGTATGGGGCCAAGAGATATATCTTAGAGGGAGGGCTGAGG
GTTTGAAGTCCAACTCCTAAGCCAGTGCCAGAAGAGCCAAGGACAGGTACGGCTGTCA
TCACTTAGACCTCACCCTGTGGAGCCACACCCTAGGGTTGGCCAATCTACTCCCAGGA
GCAGGGAGGGCAGGAGCCAGGGCTGGGCATAAAAGTCAGGGCAGAGCCATCTATTGC
TTACATTTGCTTCTGACACAAQCTGTGTTCACTAGCAACCTCAAACAGACACCATGGTGC

[chemical structure]

AGTTGGTGGTGAGGCCCTGGGCAGGTTGGTATCAAGGTTACAAGACAGGTTTAAGGAGACC
AATAGAAACTGGGCATGTGGAGACAGAGAAGACTCTTGGGTTTCTGATAGGCACTGACTCTC
TCTGCCTATTGGTCTATTTTCCCACCCTTAGGCTGCTGGTGGTCTACCCTTGGACCCAGAGGT
TCTTTGAGTCCTTTGGGGATCTGTCCACTCCTGATGCTGTTATGGGCAACCCTAAGGTGAAGG
CTCATGGCAAGAAAGTGCTCGGTGCCTTTAGTGATGGCCTGGCTCACCTGGACAACCTCAAG
GGCACCTTTGCCACACTGAGTGAGCTGCACTGTGACAAGCTGCACGTGGATCCTGAGAACTT
CAGGGTGAGTCTATGGGACGCTTGATGTTTTCTTTCCCCTTCTTTTCTATGGTTAAGTTCATGT
CATAGGAAGGGGATAAGTAACAGGGTACAGTTTAGAATGGGAAACAGACGAATGATTGCAT
CAGTGTGGAAGTCTCAGGATCGTTTTAGTTTCTTTTATTTGCTGTTCATAACAATTGTTTTCTT
TTGTTTAATTCTTGCTTTCTTTTTTTTTCTTCTCCGCAATTTTTACTATTATACTTAATGCCTTA
ACATTGTGTATAACAAAAGGAAATATCTCTGAGATACATTAAGTAACTTAAAAAAAAACTTT
ACACAGTCTGCCTAGTACATTACTATTTGGAATATATGTGTGCTTATTTGCATATTCATAATC
TCCCTACTTTATTTTCTTTTATTTTTAATTGATACATAATCATTATACATATTTATGGGTTAAA
GTGTAATGTTTTAATATGTGTACACATATTGACCAAATCAGGGTAATTTTGCATTTGTAATTT
TAAAAAATGCTTTCTTCTTTTAATATACTTTTTGTTTATCTTATTTCTAATACTTTCCCTAATC
TCTTTCTTTCAGGGCAATAATGATACAATGTATCATGCCTCTTTGCACCATTCTAAAGAATAA
CAGTGATAATTTCTGGGTTAAGGCAATAGCAATATCTCTGCATATAAATATTTCTGCATATA
AATTGTAACTG.

[0963] In some embodiments, shorter homology arms, e.g., 5′ and/or 3′ homology arms may be used. In certain embodiments, the length of the 5′ homology arm is about 5 to about 100 nucleotides. In some embodiments, the length of the 5′ homology arm is about 10 to about 150 nucleotides. In some embodiments, the length of the 5′ homology arm is about 20 to about 150 nucleotides. In certain embodiments, the length of the 5′ homology arm is about 10, 20, 50, 100, 150, 200, 250, 300, 350, 400, 450, 500, 550, 600, 650, 700, 750, 800, 850, 900, 950, 1000, 1100, 1200, or more nucleotides in length.

[0964] In certain embodiments, the length of the 3′ homology arm is about 5 to about 100 nucleotides. In some embodiments, the length of the 3′ homology arm is about 10 to about 150 nucleotides. In some embodiments, the length of the 3′ homology arm is about 20 to about 150 nucleotides. In certain embodiments, the length of the 3′ homology arm is about 10, 20, 50, 100, 150, 200, 250, 300, 350, 400, 450, 500, 550, 600, 650, 700, 750, 800, 850, 900, 950, 1000, 1100, 1200, or more nucleotides in length.

[0965] It is contemplated herein that one or both homology arms may be shortened to avoid including certain sequence repeat elements, e.g., Alu repeats, LINE elements. For example, a 5′ homology arm may be shortened to avoid a sequence repeat element. In one embodiment, a 3′ homology arm may be shortened to avoid a sequence repeat element. In one embodiment, both the 5′ and the 3′ homology arms may be shortened to avoid including certain sequence repeat elements. In some embodiments, the length of the 5′ homology arm is at least 50 nucleotides in length, but not long enough to include a repeated element. In some embodiments, the length of the 5′ homology arm is at least 100 nucleotides in length, but not long enough to include a repeated element. In some embodiments, the length of the 5′ homology arm is at least 150 nucleotides in length, but not long enough to include a repeated element. In some embodiments, the length of the 3′ homology arm is at least 50 nucleotides in length, but not long enough to include a repeated element. In some embodiments, the length of the 3′ homology arm is at least 100 nucleotides in length, but not long enough to include a repeated element. In some embodiments, the length of the 3′ homology arm is at least 150 nucleotides in length, but not long enough to include a repeated element.

[0966] It is contemplated herein that template nucleic acids for correcting a mutation may be designed for use as a single-stranded oligonucleotide (ssODN), e.g., a single-stranded oligodeoxynucleotide. When using a ssODN, 5′ and 3′ homology arms may range up to about 200 bp in length, e.g., at least 25, 50, 75, 100, 125, 150, 175, or 200 bp in length. Longer homology arms are also contemplated for ssODNs as improvements in oligonucleotide synthesis continue to be made.

[0967] In one embodiment, an ssODN may be used to correct a mutation, e.g., E6V in the HBB gene. For example, the ssODN may include 50 bp 5′ and 3′ homology arms as shown below. The 5′ homology arm is shown as bold sequence, codon 6 is shown as underlined sequence, the inserted base to correct the E6V mutation is shown as boxed sequence, and the 3′ homology arm is shown as no emphasis sequence.

(Template Construct 2; SEQ ID NO: 16260)
ACTGTGTTCACTAGCAACCTCAAACAGACACCATGGTGCATCTGACTTC

[chemical structure]

GAAGT

[0968] Silent Mutations in the Template Nucleic Acid

[0969] It is contemplated herein that Cas9 could potentially cleave donor constructs either prior to or following homology directed repair (e.g., homologous recombination), resulting in a possible non-homologous-end-joining event and further DNA sequence mutation at the chromosomal locus of interest. Therefore, to avoid cleavage of the donor sequence before and/or after Cas9-mediated homology directed repair, in some embodiments, alternate versions of the donor sequence may be used where silent mutations are introduced. These silent mutations may disrupt Cas9 binding and cleavage, but not disrupt the amino acid sequence of the repaired gene. For example, mutations may include those made to a donor sequence to repair the HBB gene, the mutant form of which can cause Sickle Cell Disease. If gRNA HBB-6 with the 20-base target sequence CGUUACUGCCCUGUGGGGCA is used to insert a donor sequence including CTCCTGAGGAGAAGTCTGC [symbol] [symbol] AGgGTGAACGTGGA TGAAGT (SEQ ID NO: 16297), where the italic A is the base being corrected and the bracketed bases are those that match the guide RNA, the donor sequence may be changed to CTCCTGAGGAGAAGTCTGC [symbol] [symbol] AGaTGAACGTGGAT GAAGT (SEQ ID NO: 16298), where the lowercase a has been changed from a G (lower case g) at that position so that codon 15 still codes for the amino acid arginine but the PAM sequence AGG has been modified to AGA to reduce or eliminate Cas9 cleavage at that locus.

[0970] Upregulators of Gene Conversion

[0971] In certain embodiments, without being bound by theory, the methods provided herein involve up-regulating a gene conversion pathway(s). For instance, the methods may involve modulating (e.g., stimulating or overexpressing) a component (e.g., exactly one component, or one or more components, e.g., two or three components) of a gene conversion pathway, e.g., a BRCA1, BRCA2 and/or RAD51. In some embodiments, the up-regulator of gene conversion is a BRCA1. In other embodiments, the up-regulator of gene conversion is a BRCA2. In yet other embodiments, the up-regulator of gene conversion is a RAD51.

[0972] In some embodiments, the up-regulator of gene conversion is selected from the group consisting of a polypeptide of Table 5, or a polypeptide that comprises at least 60, 70, 80, 81, 82, 83, 84, 85, 86, 87, 88, 89, 90, 91, 92, 93, 94, 95, 96, 97, 98, 99 or 100% homology with, or differs by no more than 50, 40, 30, 20, 15, 14, 13, 12, 11, 10, 9, 8, 7, 6, 5, 4, 3, 2, or 1, amino acid residues from a naturally occurring polypeptide of Table 5.

TABLE 5
Polypeptides that Promote Gene Conversion

| | | SEQ ID |
|---|---|---|
| Factor | Sequence | NOs |
| BRCA2 | MPIGSKERPTFFEIFKTRCNKADLGPISLNWFEELSSEAPPYNSEPAEESEHKNNNYEPNLFKTPQRKPS | 16304 |
| | YNQLASTPIIFKEQGLTLPLYQSPVKELDKFKLDLGRNVPNSRHKSLRTVKTKMDQADDVSCPLLNSCLS | |
| | ESPVVLQCTHVTPQRDKSVVCGSLFHTPKFVKGRQTPKHISESLGAEVDPDMSWSSSLATPPTLSSTVLI | |
| | VRNEEASETVFPHDTTANVKSYFSNHDESLKKNDRFIASVTDSENTNQREAASHGFGKTSGNSFKVNSCK | |
| | DHIGKSMPNVLEDEVYETVVDTSEEDSFSLCFSKCRTKNLQKVRTSKTRKKIFHEANADECEKSKNQVKE | |
| | KYSFVSEVEPNDTDPLDSNVANQKPFESGSDKISKEVVPSLACEWSQLTLSGLNGAQMEKIPLLHISSCD | |
| | QNISEKDLLDTENKRKKDFLTSENSLPRISSLPKSEKPLNEETVVNKRDEEQHLESHTDCILAVKQAISG | |
| | TSPVASSFQGIKKSIFRIRESPKETFNASFSGHMTDPNFKKETEASESGLEIHTVCSQKEDSLCPNLIDN | |
| | GSWPATTTQNSVALKNAGLISTLKKKTNKFIYAIHDETSYKGKKIPKDQKSELINCSAQFEANAFEAPLT | |
| | FANADSGLLHSSVKRSCSQNDSEEPTLSLTSSFGTILRKCSRNETCSNNTVISQDLDYKEAKCNKEKLQL | |
| | FITPEADSLSCLQEGQCENDPKSKKVSDIKEEVLAAACHPVQHSKVEYSDTDFQSQKSLLYDHENASTLI | |
| | LTPTSKDVLSNLVMISRGKESYKMSDKLKGNNYESDVELTKNIPMEKNQDVCALNENYKNVELLPPEKYM | |
| | RVASPSRKVQFNQNTNLRVIQKNQEETTSISKITVNPDSEELFSDNENNFVFQVANERNNLALGNTKELH | |
| | ETDLTCVNEPIFKNSTMVLYGDTGDKQATQVSIKKDLVYVLAEENKNSVKQHIKMTLGQDLKSDISLNID | |
| | KIPEKNNDYMNKWAGLLGPISNHSFGGSFRTASNKEIKLSEHNIKKSKMFFKDIEEQYPTSLACVEIVNT | |
| | LALDNQKKLSKPQSINTVSAHLQSSVVVSDCKNSHITPQMLFSKQDFNSNHNLTPSQKAEITELSTILEE | |
| | SGSQFEFTQFRKPSYILQKSTFEVPENQMTILKTTSEECRDADLHVIMNAPSIGQVDSSKQFEGTVEIKR | |
| | KFAGLLKNDCNKSASGYLTDENEVGFRGFYSAHGTKLNVSTEALQKAVKLFSDIENISEETSAEVHPISL | |
| | SSSKCHDSVVSMFKIENHNDKTVSEKNNKCQLILQNNIEMTTGTFVEEITENYKRNTENEDNKYTAASRN | |
| | SHNLEFDGSDSSKNDTVCIHKDETDLLFTDQHNICLKLSGQFMKEGNTQIKEDLSDLTFLEVAKAQEACH | |
| | GNTSNKEQLTATKTEQNIKDFETSDTFFQTASGKNISVAKESFNKIVNFFDQKPEELHNFSLNSELHSDI | |
| | RKNKMDILSYEETDIVKHKILKESVPVGTGNQLVTFQGQPERDEKIKEPTLLGFHTASGKKVKIAKESLD | |
| | KVKNLFDEKEQGTSEITSFSHQWAKTLKYREACKDLELACETIEITAAPKCKEMQNSLNNDKNLVSIETV | |
| | VPPKLLSDNLCRQTENLKTSKSIFLKVKVHENVEKETAKSPATCYTNQSPYSVIENSALAFYTSCSRKTS | |
| | VSQTSLLEAKKWLREGIFDGQPERINTADYVGNYLYENNSNSTIAENDKNHLSEKQDTYLSNSSMSNSYS | |
| | YHSDEVYNDSGYLSKNKLDSGIEPVLKNVEDQKNTSFSKVISNVKDANAYPQTVNEDICVEELVTSSSPC | |
| | KNKNAAIKLSISNSNNFEVGPPAFRIASGKIVCVSHETIKKVKDIFTDSFSKVIKENNENKSKICQTKIM | |
| | AGCYEALDDSEDILHNSLDNDECSTHSHKVFADIQSEEILQHNQNMSGLEKVSKISPCDVSLETSDICKC | |
| | SIGKLHKSVSSANTCGIFSTASGKSVQVSDASLQNARQVFSEIEDSTKQVFSKVLFKSNEHSDQLTREEN | |
| | TAIRTPEHLISQKGFSYNVVNSSAFSGFSTASGKQVSILESSLHKVKGVLEEFDLIRTEHSLHYSPTSRQ | |
| | NVSKILPRVDKRNPEHCVNSEMEKTCSKEFKLSNNLNVEGGSSENNHSIKVSPYLSQFQQDKQQLVLGTK | |
| | VSLVENIHVLGKEQASPKNVKMEIGKTETFSDVPVKTNIEVCSTYSKDSENYFETEAVEIAKAFMEDDEL | |
| | TDSKLPSHATHSLFTCPENEEMVLSNSRIGKRRGEPLILVGEPSIKRNLLNEFDRIIENQEKSLKASKST | |
| | PDGTIKDRRLFMHHVSLEPITCVPFRTTKERQEIQNPNFTAPGQEFLSKSHLYEHLTLEKSSSNLAVSGH | |
| | PFYQVSATRNEKMRHLITTGRPTKVFVPPFKTKSHFHRVEQCVRNINLEENRQKQNIDGHGSDDSKNKIN | |
| | DNEIHQFNKNNSNQAVAVTFTKCEEEPLDLITSLQNARDIQDMRIKKKQRQRVFPQPGSLYLAKTSTLPR | |
| | ISLKAAVGGQVPSACSHKQLYTYGVSKHCIKINSKNAESFQFHTEDYFGKESLWTGKGIQLADGGWLIPS | |
| | NDGKAGKEEFYRALCDTPGVDPKLISRINVYNHYRWIIWKLAAMECAFPKEFANRCLSPERVLLQLKYRY | |
| | DTEIDRSRRSAIKKIMERDDTAAKTLVLCVSDIISLSANISETSSNKTSSADTQKVAIIELTDGWYAVKA | |
| | QLDPPLLAVLKNGRLTVGQKIILHGAELVGSPDACTPLEAPESLMLKISANSTRPARWYTKLGFFPDPRP | |
| | FPLPLSSLFSDGGNVGCVDVIIQRAYPIQWMEKTSSGLYIFRNEREEEKEAAKYVEAQQKRLEALFTKIQ | |
| | EEFEEHEENTTKPYLPSRALTRQQVRALQDGAELYEAVKNAADPAYLEGYFSEEQLRALNNHRQMLNDKK | |
| | QAQIQLEIRKAMESAEQKEQGLSRDVTTVWKLRIVSYSKKEKDSVILSIWRPSSDLYSLLTEGKRYRIYH | |
| | LATSKSKSKSERANIQLAATKKTQYQQLPVSDEILFQIYQPREPLHFSKFLDPDFQPSCSEVDLIGFVVS | |
| | VVKKTGLAPFVYLSDECYNLLAIKFWIDLNEDIIKPHMLIAASNLQWRPESKSGLLTLFAGDFSVFSASP | |
| | KEGHFQETFNKMKNTVENIDILCNEAENKLMHILHANDPKWSTPTKDCTSGPYTAQIIPGTGNKLLMSSP | |
| | NCEIYYQSPLSLCMAKRKSVSTPVSAQMTSKSCKGEKEIDDQKNCKKRRALDFLSRLPLPPPVSPICTFV | |
| | SPAAQKAFQPPRSCGTKYETPIKKKELNSPQMTPFKKFNEISLLESNSIADEELALINTQALLSGSTGEK | |
| | QFISVSESTRTAPTSSEDYLRLKRRCTTSLIKEQESSQASTEECEKNKQDTITTKKYI (breast | |
| | cancer 2, early onset, isoform CRA_c [Homo sapiens] CCDS 9344.1) | |
| BRCA1 | MDLSALRVEEVQNVINAMQKILECPICLELIKEPVSTKCDHIFCKFCMLKLLNQKKGPSQCPLCKNDITK | 16305- |
| | RSLQESTRFSQLVEELLKIICAFQLDTGLEYANSYNFAKKENNSPEHLKDEVSTIQSMGYRNRAKRLLQS | 16309 |
| | EPENPSLQETSLSVQLSNLGTVRTLRTKQRIQPQKTSVYIELGSDSSEDTVNKATYCSVGDQELLQITPQ | |
| | GTRDEISLDSAKKAACEFSETDVTNTEHHQPSNNDLNTTEKRAAERHPEKYQGSSVSNLHVEPCGTNTHA | |
| | SSLQHENSSLLLTKDRMNVEKAEFCNKSKQPGLARSQHNRWAGSKETCNDRRTPSTEKKVDLNADPLCER | |
| | KEWNKQKLPCSENPRDTEDVPWITLNSSIQKVNEWFSRSDELLGSDDSHDGESESNAKVADVLDVLNEVD | |
| | EYSGSSEKIDLLASDPHEALICKSERVHSKSVESNIEDKIFGKTYRKKASLPNLSHVTENLIIGAFVTEP | |
| | QIIQERPLTNKLKRKRRPTSGLHPEDFIKKADLAVQKTPEMINQGTNQTEQNGQVMNITNSGHENKTKGD | |
| | SIQNEKNPNPIESLEKESAFKTKAEPISSSISNMELELNIHNSKAPKKNRLRRKSSTRHIHALELVVSRN | |
| | LSPPNCTELQIDSCSSSEEIKKKKYNQMPVRHSRNLQLMEGKEPATGAKKSNKPNEQTSKRHDSDTFPEL | |
| | KLTNAPGSFTKCSNTSELKEFVNPSLPREEKEEKLETVKVSNNAEDPKDLMLSGERVLQTERSVESSSIS | |
| | LVPGTDYGTQESISLLEVSTLGKAKTEPNKCVSQCAAFENPKGLIHGCSKDNRNDTEGFKYPLGHEVNHS | |
| | RETSIEMEESELDAQYLQNTFKVSKRQSFAPFSNPGNAEEECATFSAHSGSLKKQSPKVTFECEQKEENQ | |
| | GKNESNIKPVQTVNITAGFPVVGQKDKPVDNAKCSIKGGSRFCLSSQFRGNETGLITPNKHGLLQNPYRI | |
| | PPLFPIKSFVKTKCKKNLLEENFEEHSMSPEREMGNENIPSTVSTISRNNIRENVFKEASSSNINEVGSS | |
| | TNEVGSSINEIGSSDENIQAELGRNRGPKLNAMLRLGVLQPEVYKQSLPGSNCKHPEIKKQEYEEVVQTV | |
| | NTDFSPYLISDNLEQPMGSSHASQVCSETPDDLLDDGEIKEDTSFAENDIKESSAVFSKSVQKGELSRSP | |
| | SPFTHTHLAQGYRRGAKKLESSEENLSSEDEELPCFQHLLFGKVNNIPSQSTRHSTVATECLSKNTEENL | |
| | LSLKNSLNDCSNQVILAKASQEHHLSEETKCSASLFSSQCSELEDLTANTNTQDPFLIGSSKQMRHQSES | |
| | QGVGLSDKELVSDDEERGTGLEENNQEEQSMDSNLGEAASGCESETSVSEDCSGLSSQSDILTTQQRDTM | |
| | QHNLIKLQQEMAELEAVLEQHGSQPSNSYPSIISDSSALEDLRNPEQSTSEKAVLTSQKSSEYPISQNPE | |
| | GLSADKFEVSADSSTSKNKEPGVERSSPSKCPSLDDRWYMHSCSGSLQNRNYPSQEELIKVVDVEEQQLE | |
| | ESGPHDLTETSYLPRQDLEGTPYLESGISLFSDDPESDPSEDRAPESARVGNIPSSTSALKVPQLKVAES | |
| | AQSPAAAHTTDTAGYNAMEESVSREKPELTASTERVNKRMSMVVSGLTPEEFMLVYKFARKHHITLTNLI | |
| | TEETTHVVMKTDAEFVCERTLKYFLGIAGGKWVVSYFWVTQSIKERKMLNEHDFEVRGDVVNGRNHQGPK | |
| | RARESQDRKIFRGLEICCYGPFTNMPTDQLEWMVQLCGASVVKELSSFTLGTGVHPIVVVQPDAWTEDNG | |
| | FHAIGQMCEAPVVTREWVLDSVALYQCQELDTYLIPQIPHSHY (breast cancer type 1 | |
| | susceptibility protein isoform 1 [Homo sapiens] CCDS 11453.1) | |
| | MLKLLNQKKGPSQCPLCKNDITKRSLQESTRFSQLVEELLKIICAFQLDTGLEYANSYNFAKKENNSPEH | |
| | LKDEVSIIQSMGYRNRAKRLLQSEPENPSLQETSLSVQLSNLGTVRTLRTKQRIQPQKTSVYIELGSDSS | |
| | EDTVNKATYCSVGDQELLQITPQGTRDEISLDSAKKAACEFSETDVTNTEHHQPSNNDLNTTEKRAAERH | |
| | PEKYQGSSVSNLHVEPCGTNTHASSLQHENSSLLLTKDRMNVEKAEFCNKSKQPGLARSQHNRWAGSKET | |
| | CNDRRTPSTEKKVDLNADPLCERKEWNKQKLPCSENPRDTEDVPWITLNSSIQKVNEWFSRSDELLGSDD | |
| | SHDGESESNAKVADVLDVLNEVDEYSGSSEKIDLLASDPHEALICKSERVHSKSVESNIEDKIFGKTYRK | |
| | KASLPNLSHVTENLIIGAFVTEPQIIQERPLTNKLKRKRRPTSGLHPEDFIKKADLAVQKTPEMINQGTN | |
| | QTEQNGQVMNITNSGHENKTKGDSIQNEKNPNPIESLEKESAFKTKAEPISSSISNMELELNIHNSKAPK | |
| | KNRLRRKSSTRHIHALELVVSRNLSPPNCTELQIDSCSSSEEIKKKKYNQMPVRHSRNLQLMEGKEPATG | |
| | AKKSNKPNEQTSKRHDSDTFPELKLTNAPGSFTKCSNTSELKEFVNPSLPREEKEEKLETVKVSNNAEDP | |
| | KDLMLSGERVLQTERSVESSSISLVPGTDYGTQESISLLEVSTLGKAKTEPNKCVSQCAAFENPKGLIHG | |
| | CSKDNRNDTEGFKYPLGHEVNHSRETSIEMEESELDAQYLQNTFKVSKRQSFAPFSNPGNAEEECATFSA | |
| | HSGSLKKQSPKVTFECEQKEENQGKNESNIKPVQTVNITAGFPVVGQKDKPVDNAKCSIKGGSRFCLSSQ | |
| | FRGNETGLITPNKHGLLQNPYRIPPLFPIKSFVKTKCKKNLLEENFEEHSMSPEREMGNENIPSTVSTIS | |
| | RNNIRENVFKEASSSNINEVGSSTNEVGSSINEIGSSDENIQAELGRNRGPKLNAMLRLGVLQPEVYKQS | |
| | LPGSNCKHPEIKKQEYEEVVQTVNTDFSPYLISDNLEQPMGSSHASQVCSETPDDLLDDGEIKEDTSFAE | |
| | NDIKESSAVFSKSVQKGELSRSPSPFTHTHLAQGYRRGAKKLESSEENLSSEDEELPCFQHLLFGKVNNI | |
| | PSQSTRHSTVATECLSKNTEENLLSLKNSLNDCSNQVILAKASQEHHLSEETKCSASLFSSQCSELEDLT | |
| | ANTNTQDPFLIGSSKQMRHQSESQGVGLSDKELVSDDEERGTGLEENNQEEQSMDSNLGEAASGCESETS | |
| | VSEDCSGLSSQSDILTTQQRDTMQHNLIKLQQEMAELEAVLEQHGSQPSNSYPSIISDSSALEDLRNPEQ | |
| | STSEKAVLTSQKSSEYPISQNPEGLSADKFEVSADSSTSKNKEPGVERSSPSKCPSLDDRWYMHSCSGSL | |
| | QNRNYPSQEELIKVVDVEEQQLEESGPHDLTETSYLPRQDLEGTPYLESGISLFSDDPESDPSEDRAPES | |
| | ARVGNIPSSTSALKVPQLKVAESAQSPAAAHTTDTAGYNAMEESVSREKPELTASTERVNKRMSMVVSGL | |
| | TPEEFMLVYKFARKHHITLTNLITEETTHVVMKTDAEFVCERTLKYFLGIAGGKWVVSYFWVTQSIKERK | |
| | MLNEHDFEVRGDVVNGRNHQGPKRARESQDRKIFRGLEICCYGPFTNMPTDQLEWMVQLCGASVVKELSS | |
| | FTLGTGVHPIVVVQPDAWTEDNGFHAIGQMCEAPVVTREWVLDSVALYQCQELDTYLIPQIPHSHY | |
| | (breast cancer type 1 susceptibility protein isoform 2 [Homo sapiens] | |
| | CCDS 11459.2) | |
| | MDLSALRVEEVQNVINAMQKILECPICLELIKEPVSTKCDHIFCKFCMLKLLNQKKGPSQCPLCKNDITK | |
| | RSLQESTRFSQLVEELLKIICAFQLDTGLEYANSYNFAKKENNSPEHLKDEVSIIQSMGYRNRAKRLLQS | |
| | EPENPSLQETSLSVQLSNLGTVRTLRTKQRIQPQKTSVYIELGSDSSEDTVNKATYCSVGDQELLQITPQ | |
| | GTRDEISLDSAKKAACEFSETDVTNTEHHQPSNNDLNTTEKRAAERHPEKYQGSSVSNLHVEPCGTNTHA | |
| | SSLQHENSSLLLTKDRMNVEKAEFCNKSKQPGLARSQHNRWAGSKETCNDRRTPSTEKKVDLNADPLCER | |
| | KEWNKQKLPCSENPRDTEDVPWITLNSSIQKVNEWFSRSDELLGSDDSHDGESESNAKVADVLDVLNEVD | |
| | EYSGSSEKIDLLASDPHEALICKSERVHSKSVESNIEDKIFGKTYRKKASLPNLSHVTENLIIGAFVTEP | |
| | QIIQERPLTNKLKRKRRPTSGLHPEDFIKKADLAVQKTPEMINQGTNQTEQNGQVMNITNSGHENKTKGD | |
| | SIQNEKNPNPIESLEKESAFKTKAEPISSSISNMELELNIHNSKAPKKNRLRRKSSTRHIHALELVVSRN | |
| | LSPPNCTELQIDSCSSSEEIKKKKYNQMPVRHSRNLQLMEGKEPATGAKKSNKPNEQTSKRHDSDTFPEL | |
| | KLTNAPGSFTKCSNTSELKEFVNPSLPREEKEEKLETVKVSNNAEDPKDLMLSGERVLQTERSVESSSIS | |
| | LVPGTDYGTQESISLLEVSTLGKAKTEPNKCVSQCAAFENPKGLIHGCSKDNRNDTEGFKYPLGHEVNHS | |
| | RETSIEMEESELDAQYLQNTFKVSKRQSFAPFSNPGNAEEECATFSAHSGSLKKQSPKVTFECEQKEENQ | |
| | GKNESNIKPVQTVNITAGFPVVGQKDKPVDNAKCSIKGGSRFCLSSQFRGNETGLITPNKHGLLQNPYRI | |
| | PPLFPIKSFVKTKCKKNLLEENFEEHSMSPEREMGNENIPSTVSTISRNNIRENVFKEASSSNINEVGSS | |
| | TNEVGSSINEIGSSDENIQAELGRNRGPKLNAMLRLGVLQPEVYKQSLPGSNCKHPEIKKQEYEEVVQTV | |
| | NTDFSPYLISDNLEQPMGSSHASQVCSETPDDLLDDGEIKEDTSFAENDIKESSAVFSKSVQKGELSRSP | |
| | SPFTHTHLAQGYRRGAKKLESSEENLSSEDEELPCFQHLLFGKVNNIPSQSTRHSTVATECLSKNTEENL | |
| | LSLKNSLNDCSNQVILAKASQEHHLSEETKCSASLFSSQCSELEDLTANTNTQDPFLIGSSKQMRHQSES | |
| | QGVGLSDKELVSDDEERGTGLEENNQEEQSMDSNLGEAASGCESETSVSEDCSGLSSQSDILTTQQRDTM | |
| | QHNLIKLQQEMAELEAVLEQHGSQPSNSYPSIISDSSALEDLRNPEQSTSEKDSHIHGQRNNSMFSKRPR | |
| | EHISVLTSQKSSEYPISQNPEGLSADKFEVSADSSTSKNKEPGVERSSPSKCPSLDDRWYMHSCSGSLQN | |
| | RNYPSQEELIKVVDVEEQQLEESGPHDLTETSYLPRQDLEGTPYLESGISLFSDDPESDPSEDRAPESAR | |
| | VGNIPSSTSALKVPQLKVAESAQSPAAAHTTDTAGYNAMEESVSREKPELTASTERVNKRMSMVVSGLTP | |
| | EEFMLVYKFARKHHITLTNLITEETTHVVMKTDAEFVCERTLKYFLGIAGGKWVVSYFWVTQSIKERKML | |
| | NEHDFEVRGDVVNGRNHQGPKRARESQDRKIFRGLEICCYGPFTNMPTDQLEWMVQLCGASVVKELSSFT | |
| | LGTGVHPIVVVQPDAWTEDNGFHAIGQMCEAPVVTREWVLDSVALYQCQELDTYLIPQIPHSHY | |
| | (breast cancer type 1 susceptibility protein isoform 2 [Homo sapiens], | |
| | CCDS 11456.2) | |
| | MDLSALRVEEVQNVINAMQKILECPICLELIKEPVSTKCDHIFCKFCMLKLLNQKKGPSQCPLCKNDITK | |
| | RSLQESTRESQLVEELLKIICAFQLDTGLEYANSYNFAKKENNSPEHLKDEVSIIQSMGYRNRAKRLLQS | |
| | EPENPSLQETSLSVQLSNLGTVRTLRTKQRIQPQKTSVYIELGSDSSEDTVNKATYCSVGDQELLQITPQ | |
| | GTRDEISLDSAKKAACEFSETDVTNTEHHQPSNNDLNTTEKRAAERHPEKYQGEAASGCESETSVSEDCS | |
| | GLSSQSDILTTQQRDTMQHNLIKLQQEMAELEAVLEQHGSQPSNSYPSIISDSSALEDLRNPEQSTSEKV | |
| | LTSQKSSEYPISQNPEGLSADKFEVSADSSTSKNKEPGVERSSPSKCPSLDDRWYMHSCSGSLQNRNYPS | |
| | QEELIKVVDVEEQQLEESGPHDLTETSYLPRQDLEGTPYLESGISLFSDDPESDPSEDRAPESARVGNIP | |
| | SSTSALKVPQLKVAESAQSPAAAHTTDTAGYNAMEESVSREKPELTASTERVNKRMSMVVSGLTPEEFML | |
| | VYKFARKHHITLTNLITEETTHVVMKTDAEFVCERTLKYFLGIAGGKWVVSYFWVTQSIKERKMLNEHDF | |
| | EVRGDVVNGRNHQGPKRARESQDRKIFRGLEICCYGPFTNMPTDQLEWMVQLCGASVVKELSSFTLGTGV | |
| | HPIVVVQPDAWTEDNGFHAIGQMCEAPVVTREWVLDSVALYQCQELDTYLIPQIPHSHY (breast | |
| | cancer type 1 susceptibility protein isoform 2 [Homo sapiens] CCDS | |
| | 11454.2) | |
| | MDLSALRVEEVQNVINAMQKILECPICLELIKEPVSTKCDHIFCKFCMLKLLNQKKGPSQCPLCKNDITK | |
| | RSLQESTRFSQLVEELLKIICAFQLDTGLEYANSYNFAKKENNSPEHLKDEVSIIQSMGYRNRAKRLLQS | |
| | EPENPSLQETSLSVQLSNLGTVRTLRTKQRIQPQKTSVYIELGSDSSEDTVNKATYCSVGDQELLQITPQ | |
| | GTRDEISLDSAKKAACEFSETDVTNTEHHQPSNNDLNTTEKRAAERHPEKYQGEAASGCESETSVSEDCS | |
| | GLSSQSDILTTQQRDTMQHNLIKLQQEMAELEAVLEQHGSQPSNSYPSIISDSSALEDLRNPEQSTSEKV | |
| | LTSQKSSEYPISQNPEGLSADKFEVSADSSTSKNKEPGVERSSPSKCPSLDDRWYMHSCSGSLQNRNYPS | |
| | QEELIKVVDVEEQQLEESGPHDLTETSYLPRQDLEGTPYLESGISLFSDDPESDPSEDRAPESARVGNIP | |
| | SSTSALKVPQLKVAESAQSPAAAHTTDTAGYNAMEESVSREKPELTASTERVNKRMSMVVSGLTPEEFML | |
| | VYKFARKHHITLTNLITEETTHVVMKTDAEFVCERTLKYFLGIAGGKWVVSYFWVTQSIKERKMLNEHDF | |
| | EVRGDVVNGRNHQGPKRARESQDRKIFRGLEICCYGPFTNMPTGCPPNCGCAARCLDRGQWLPCNWADV | |
| | (breast cancer type 1 susceptibility protein isoform 2 [Homo sapiens] | |
| | CCDS 11455.2) | |
| RAD51 | MAMQMQLEANADTSVEEESFGPQPISRLEQCGINANDVKKLEEAGFHTVEAVAYAPKKELINIKGISEAK | 16310- |
| | ADKILAEAAKLVPMGETTATEFHQRRSETIQITTGSKELDKLLQGGIETGSITEMFGEFRTGKTQICHTL | 16312 |
| | AVTCQLPIDRGGGEGKAMYIDTEGTFRPERLLAVAERYGLSGSDVLDNVAYARAFNTDHQTQLLYQASAM | |
| | MVESRYALLIVDSATALYRTDYSGRGELSARQMHLARFLRMLLRLADEFGVAVVITNQVVAQVDGAAMFA | |
| | ADPKKPIGGNIFAHASTTRLYLRKGRGETRICKIYDSPCLPEAEAMFAINADGVGDAKD (RAD51 | |
| | [Homo sapiens], CCDS 10062.1) | |
| | MAMQMQLEANADTSVEEESFGPQPISRLEQCGINANDVKKLEEAGFHTVEAVAYAPKKELINIKGISEAK | |
| | ADKILTESRSVARLECNSVILVYCTLRLSGSSDSPASASRVVGTTGGIETGSITEMFGEFRTGKTQICHT | |
| | LAVTCQLPIDRGGGEGKAMYIDTEGTFRPERLLAVAERYGLSGSDVLDNVAYARAFNTDHQTQLLYQASA | |
| | MMVESRYALLIVDSATALYRTDYSGRGELSARQMHLARFLRMLLRLADEFGVAVVITNQVVAQVDGAAMF | |
| | AADPKKPIGGNIIAHASTTRLYLRKGRGETRICKIYDSPCLPEAEAMFAINADGVGDAKD (RAD51 | |
| | [Homo sapiens], CCDS 53931.1) | |
| | MAMQMQLEANADTSVEEESFGPQPISRLEQCGINANDVKKLEEAGFHTVEAVAYAPKKELINIKGISEAK | |
| | ADKILAEAAKLVPMGFTTATEFHQRRSEIIQITTGSKELDKLLQGGIETGSITEMFGEFRTGKTQICHTL | |
| | AVTCQLPIDRGGGEGKAMYIDTEGTFRPERLLAVAERYGLSGSDVLDNVAYARAFNTDHQTQLLYQASAM | |
| | MVESRYALLIVDSATALYRTDYSGRGELSARQMHLARFLRMLLRLADEIVSEERKRGNQNLQNLRLSLSS | |
| | (CCDS 53932.1) | |

[0973] In certain embodiments of the methods provided herein, the frequency of preferred repair outcomes generated using a Cas9 molecule described herein may be increased by modulating (e.g., stimulating or overexpressing) a component (e.g., exactly one component, or one or more components, e.g., two or three components) of a gene conversion pathway, e.g., a BRCA1, BRCA2 and/or RAD51. In some embodiments, the frequency of gene conversion resulting from a Cas9 nuclease (e.g., wild type Cas9 nuclease) induced-lesion in a target position of a target cell overexpressing a gene conversion pathway component is increased at least about 1-fold, at least about 2-fold, at least about 3-fold, at least about 4-fold, at least about 5-fold, at least about 6-fold, at least about 7-fold, at least about 8-fold, at least about 9-fold, at least about 10-fold, or more, as compared to the frequency of gene conversion resulting from a Cas9 nickase (e.g., a Cas9 D10A nickase) induced-lesion in a target position in the absence of overexpression of a gene conversion pathway.

[0974] In some embodiments, the frequency of gene conversion resulting from a Cas9 nuclease (e.g., wild type Cas9 nuclease) induced-lesion in a target position of a target cell overexpressing a gene conversion pathway component is increased at least 5% (e.g., at least about 5%, at least about 10%, at least about 15%, at least about 20%, at least about 25%, at least about 30%, at least about 35%, at least about 40%, at least about 45%, at least about 50%, at least about 55%, at least about 60%, at least about 65%, at least about 70%, at least about 75%, at least about 80%, at least about 85%, at least about 90%, at least about 95%, at least about 100%, at least about 150%, at least about 200%, at least about 300%, at least about 400%, at least about 500%, at least about 600%, at least about 700%, at least about 800%, at least about 900%, or more, as compared to the frequency of gene conversion resulting from a Cas9 nickase (e.g., a Cas9 D10A nickase) induced-lesion in a target position in the absence of overexpression of a gene conversion pathway.

[0975] In certain embodiments of the methods provided herein, the frequency of preferred repair outcomes generated using a Cas9 molecule described herein may be increased by modulating (e.g., stimulating or overexpressing) a component (e.g., exactly one component, or one or more components, e.g., two or three components) of a gene conversion pathway, e.g., a BRCA1, BRCA2 and/or RAD51. In some embodiments, the frequency of gene conversion resulting from a Cas9 nickase (e.g., a Cas9 D10A nickase) induced-lesion in a target position of a target cell overexpressing a gene conversion pathway component is increased at least about 1-fold, at least about 2-fold, at least about 3-fold, at least about 4-fold, at least about 5-fold, at least about 6-fold, at least about 7-fold, at least about 8-fold, at least about 9-fold, at least about 10-fold, or more, as compared to the frequency of gene conversion resulting from a Cas9 nickase (e.g., a Cas9 D10A nickase) induced-lesion in a target position in the absence of overexpression of a gene conversion pathway.

[0976] In some embodiments, the frequency of gene conversion resulting from a Cas9 nickase (e.g., a Cas9 D10A nickase) induced-lesion in a target position of a target cell overexpressing a gene conversion pathway component is increased at least 5% (e.g., at least about 5%, at least about 10%, at least about 15%, at least about 20%, at least about 25%, at least about 30%, at least about 35%, at least about 40%, at least about 45%, at least about 50%, at least about 55%, at least about 60%, at least about 65%, at least about 70%, at least about 75%, at least about 80%, at least about 85%, at least about 90%, at least about 95%, at least about 100%, at least about 150%, at least about 200%, at least about 300%, at least about 400%, at least about 500%, at least about 600%, at least about 700%, at least about 800%, at least about 900%, or more, as compared to the frequency of gene conversion resulting from a Cas9 nickase (e.g., a Cas9 D10A nickase) induced-lesion in a target position in the absence of overexpression of a gene conversion pathway.

[0977] V.2 NHEJ Approaches for Gene Targeting

[0978] In certain embodiments of the methods provided herein, NHEJ-mediated deletion is used to delete all or part of a target gene. As described herein, nuclease-induced NHEJ can also be used to remove (e.g., delete) sequences in a gene of interest.

[0979] While not wishing to be bound by theory, it is believed that, in certain embodiments, the genomic alterations associated with the methods described herein rely on nuclease-induced NHEJ and the error-prone nature of the NHEJ repair pathway. NHEJ repairs a double-strand break in the DNA by joining together the two ends; however, generally, the original sequence is restored only if two compatible ends, exactly as they were formed by the double-strand break, are perfectly ligated. The DNA ends of the double-strand break are frequently the subject of enzymatic processing, resulting in the addition or removal of nucleotides, e.g., resection, at one or both strands, prior to rejoining of the ends. This results in the presence of insertion and/or deletion (indel) mutations in the DNA sequence at the site of the NHEJ repair. Two-thirds of these mutations typically alter the reading frame and, therefore, produce a non-functional protein. Additionally, mutations that maintain the reading frame, but which insert or delete a significant amount of sequence, can destroy functionality of the protein. This is locus dependent as mutations in critical functional domains are likely less tolerable than mutations in non-critical regions of the protein.

[0980] The indel mutations generated by NHEJ are unpredictable in nature; however, at a given break site certain indel sequences are favored and are over represented in the population, likely due to small regions of microhomology. The lengths of deletions can vary widely; most commonly in the 1-50 bp range, but they can easily reach greater than 100-200 bp. In some embodiments, the deletion is at least about 1, 2, 3, 4, 5, 6, 7, 8, 9, 10, 11, 12, 13, 14, 15, 16, 17, 18, 19, 20, 30, 40, 47, 50, 75, 100, 200, 300, 400, 500, 750, 1000, 2000, 3000, 4000, 5000, 6000, 7000, 8000, 9000, 10000, 15000, 20000, 25000, 30000, 40000, 50000, 60000, 70000, 80000, 90000, 100000, 200000, 300000, 400000, 500000, 600000, 700000, 800000, 900000, 1000000 or more nucleotides in length. Insertions tend to be shorter and often include short duplications of the sequence immediately surrounding the break site. However, it is possible to obtain large insertions, and in these cases, the inserted sequence has often been traced to other regions of the genome or to plasmid DNA present in the cells.

[0981] Because NHEJ is a mutagenic process, it can also be used to delete small sequence motifs as long as the generation of a specific final sequence is not required. If a double-strand break is targeted near to a short target sequence, the deletion mutations caused by the NHEJ repair often span, and therefore remove, the unwanted nucleotides. For the deletion of larger DNA segments, introducing two double-strand breaks, one on each side of the sequence, can result in NHEJ between the ends with removal of the entire intervening sequence. Both of these approaches can be used to delete specific DNA sequences; however, the error-prone nature of NHEJ may still produce indel mutations at the site of repair.

[0982] Both double-strand cleaving eaCas9 molecules and single strand, or nickase, eaCas9 molecules can be used in the methods and compositions described herein to generate NHEJ-mediated indels. NHEJ-mediated indels targeted to the gene, e.g., a coding region, e.g., an early coding region of a gene of interest can be used to knockout (i.e., eliminate expression of) a gene of interest. For example, early coding region of a gene of interest includes sequence immediately following a transcription start site, within a first exon of the coding sequence, or within 500 bp of the transcription start site (e.g., less than 500, 450, 400, 350, 300, 250, 200, 150, 100 or 50 bp).

[0983] Placement of Double-Strand or Single-Strand Breaks Relative to the Target Position

[0984] In certain embodiments, in which a gRNA and Cas9 nuclease generate a double-strand break for the purpose of inducing NHEJ-mediated indels, a gRNA, e.g., a unimolecular (or chimeric) or modular gRNA molecule, is configured to position one double-strand break in close proximity to a nucleotide of the target position. In one embodiment, the cleavage site is between 0-30 bp away from the target position (e.g., less than 30, 25, 20, 15, 10, 9, 8, 7, 6, 5, 4, 3, 2 or 1 bp from the target position).

[0985] In certain embodiments, in which two gRNAs complexing with Cas9 nickases induce two single-strand breaks for the purpose of inducing NHEJ-mediated indels, two gRNAs, e.g., independently, unimolecular (or chimeric) or modular gRNA, are configured to position two single-strand breaks to provide for NHEJ repair a nucleotide of the target position. In certain embodiments, the gRNAs are configured to position cuts at the same position, or within a few nucleotides of one another, on different strands, essentially mimicking a double-strand break. In certain embodiments, the closer nick is between 0-30 bp away from the target position (e.g., less than 30, 25, 20, 15, 10, 9, 8, 7, 6, 5, 4, 3, 2, or 1 bp from the target position), and the two nicks are within 25-55 bp of each other (e.g., between 25 to 50, 25 to 45, 25 to 40, 25 to 35, 25 to 30, 50 to 55, 45 to 55, 40 to 55, 35 to 55, 30 to 55, 30 to 50, 35 to 50, 40 to 50, 45 to 50, 35 to 45, or 40 to 45 bp) and no more than 100 bp away from each other (e.g., no more than 90, 80, 70, 60, 50, 40, 30, 20, or 10 bp). In certain embodiments, the gRNAs are configured to place a single-strand break on either side of a nucleotide of the target position.

[0986] Both double-strand cleaving eaCas9 molecules and single strand, or nickase, eaCas9 molecules can be used in the methods and compositions described herein to generate breaks both sides of a target position. Double-strand or paired single-strand breaks may be generated on both sides of a target position to remove the nucleic acid sequence between the two cuts (e.g., the region between the two breaks in deleted). In certain embodiments, two gRNAs, e.g., independently, unimolecular (or chimeric) or modular gRNA, are configured to position a double-strand break on both sides of a target position. In other embodiments, three gRNAs, e.g., independently, unimolecular (or chimeric) or modular gRNA, are configured to position a double-strand break (i.e., one gRNA complexes with a Cas9 nuclease) and two single-strand breaks or paired single-strand breaks (i.e., two gRNAs complex with Cas9 nickases) on either side of the target position. In certain embodiments, four gRNAs, e.g., independently, unimolecular (or chimeric) or modular gRNA, are configured to generate two pairs of single-strand breaks (i.e., two pairs of two gRNAs complex with Cas9 nickases) on either side of the target position. The double-strand break(s) or the closer of the two single-strand nicks in a pair will ideally be within 0-500 bp of the target position (e.g., no more than 450, 400, 350, 300, 250, 200, 150, 100, 50, or 25 bp from the target position). When nickases are used, the two nicks in a pair are within 25-55 bp of each other (e.g., between 25 to 50, 25 to 45, 25 to 40, 25 to 35, 25 to 30, 50 to 55, 45 to 55, 40 to 55, 35 to 55, 30 to 55, 30 to 50, 35 to 50, 40 to 50, 45 to 50, 35 to 45, or 40 to 45 bp) and no more than 100 bp away from each other (e.g., no more than 90, 80, 70, 60, 50, 40, 30, 20, or 10 bp).

[0987] V.3 Targeted Knockdown

[0988] Unlike CRISPR/Cas-mediated gene knockout, which permanently eliminates expression by mutating the gene at the DNA level, CRISPR/Cas knockdown allows for temporary reduction of gene expression through the use of artificial transcription factors. Mutating key residues in both DNA cleavage domains of the Cas9 molecule (e.g., the D10A and H840A mutations) results in the generation of a catalytically inactive Cas9 (referred to herein as “eiCas9”, which is also known as dead Cas9 or dCas9) molecule. An eiCas9 complexes with a gRNA and localizes to the DNA sequence specified by that gRNA's targeting domain, however, it does not cleave the target DNA. Fusion of the eiCas9 to an effector domain, e.g., a transcription repression domain, enables recruitment of the effector to any DNA site specified by the gRNA. Although an eiCas9 itself can block transcription when recruited to early regions in the coding sequence, more robust repression can be achieved by fusing a transcriptional repression domain (for example KRAB, SID or ERD) to the eiCas9, referred to herein as a “Cas9-repressor”, and recruiting the transcriptional repression domain to the target knockdown position, e.g., within 1000 bp of sequence 3′ of the start codon or within 500 bp of a promoter region 5′ of the start codon of a gene. It is likely that targeting DNAse I hypersensitive sites (DHSs) of the promoter may yield more efficient gene repression or activation because these regions are more likely to be accessible to the eiCas9 and are also more likely to harbor sites for endogenous transcription factors. Especially for gene repression, it is contemplated herein that blocking the binding site of an endogenous transcription factor would aid in downregulating gene expression. In certain embodiments, one or more eiCas9 molecules may be used to block binding of one or more endogenous transcription factors. In some embodiments, an eiCas9 molecule can be fused to a chromatin modifying protein. Altering chromatin status can result in decreased expression of the target gene. One or more eiCas9 molecules fused to one or more chromatin modifying proteins may be used to alter chromatin status.

[0989] In an embodiment, a gRNA molecule can be targeted to a known transcription response elements (e.g., promoters, enhancers, etc.), a known upstream activating sequences (UAS), and/or sequences of unknown or known function that are suspected of being able to control expression of the target DNA.

[0990] CRISPR/Cas-mediated gene knockdown can be used to reduce expression of an unwanted allele or transcript. Contemplated herein are scenarios wherein permanent destruction of the gene is not ideal. In these scenarios, site-specific repression may be used to temporarily reduce or eliminate expression. It is also contemplated herein that the off-target effects of a Cas9-repressor may be less severe than those of a Cas9-nuclease as a nuclease can cleave any DNA sequence and cause mutations whereas a Cas9-repressor may only have an effect if it targets the promoter region of an actively transcribed gene. However, while nuclease-mediated knockout is permanent, repression may only persist as long as the Cas9-repressor is present in the cells. Once the repressor is no longer present, it is likely that endogenous transcription factors and gene regulatory elements would restore expression to its natural state.

[0991] V.4 Single-Strand Annealing

[0992] Single-strand annealing (SSA) is another DNA repair process that repairs a double-strand break between two repeat sequences present in a target nucleic acid. Repeat sequences utilized by the SSA pathway are generally greater than 30 nucleotides in length. Resection at the break ends occurs to reveal repeat sequences on both strands of the target nucleic acid. After resection, single-strand overhangs containing the repeat sequences are coated with RPA protein to prevent the repeats sequences from inappropriate annealing, e.g., to themselves. RAD52 binds to and each of the repeat sequences on the overhangs and aligns the sequences to enable the annealing of the complementary repeat sequences. After annealing, the single-strand flaps of the overhangs are cleaved. New DNA synthesis fills in any gaps, and ligation restores the DNA duplex. As a result of the processing, the DNA sequence between the two repeats is deleted. The length of the deletion can depend on many factors including the location of the two repeats utilized, and the pathway or processivity of the resection.

[0993] In contrast to HDR pathways, SSA does not require a template nucleic acid to alter or correct a target nucleic acid sequence. Instead, the complementary repeat sequence is utilized.

[0994] V.5 Other DNA Repair Pathways

[0995] SSBR (Single-Strand Break Repair)

[0996] Single-stranded breaks (SSB) in the genome are repaired by the SSBR pathway, which is a distinct mechanism from the DSB repair mechanisms discussed above. The SSBR pathway has four major stages: SSB detection, DNA end processing, DNA gap filling, and DNA ligation. A more detailed explanation is given in Caldecott 2008, and a summary is given here.

[0997] In the first stage, when a SSB forms, PARP1 and/or PARP2 recognize the break and recruit repair machinery. The binding and activity of PARP1 at DNA breaks is transient and it seems to accelerate SSBr by promoting the focal accumulation or stability of SSBr protein complexes at the lesion. Arguably the most important of these SSBr proteins is XRCC1, which functions as a molecular scaffold that interacts with, stabilizes, and stimulates multiple enzymatic components of the SSBr process including the protein responsible for cleaning the DNA 3′ and 5′ ends. For instance, XRCC1 interacts with several proteins (DNA polymerase beta, PNK, and three nucleases, APE1, APTX, and APLF) that promote end processing. APE1 has endonuclease activity. APLF exhibits endonuclease and 3′ to 5′ exonuclease activities. APTX has endonuclease and 3′ to 5′ exonuclease activity.

[0998] This end processing is an important stage of SSBR since the 3′- and/or 5′-termini of most, if not all, SSBs are damaged. End processing generally involves restoring a damaged 3′-end to a hydroxylated state and and/or a damaged 5′ end to a phosphate moiety, so that the ends become ligation-competent. Enzymes that can process damaged 3′ termini include PNKP, APE1, and TDP1. Enzymes that can process damaged 5′ termini include PNKP, DNA polymerase beta, and APTX. LIG3 (DNA ligase III) can also participate in end processing. Once the ends are cleaned, gap filling can occur.

[0999] At the DNA gap filling stage, the proteins typically present are PARP1, DNA polymerase beta, XRCC1, FEN1 (flap endonuclease 1), DNA polymerase delta/epsilon, PCNA, and LIG1. There are two ways of gap filling, the short patch repair and the long patch repair. Short patch repair involves the insertion of a single nucleotide that is missing. At some SSBs, “gap filling” might continue displacing two or more nucleotides (displacement of up to 12 bases have been reported). FEN1 is an endonuclease that removes the displaced 5′-residues. Multiple DNA polymerases, including Polβ, are involved in the repair of SSBs, with the choice of DNA polymerase influenced by the source and type of SSB.

[1000] In the fourth stage, a DNA ligase such as LIG1 (Ligase I) or LIG3 (Ligase III) catalyzes joining of the ends. Short patch repair uses Ligase III and long patch repair uses Ligase I.

[1001] Sometimes, SSBR is replication-coupled. This pathway can involve one or more of CtIP, MRN, ERCC1, and FEN1. Additional factors that may promote SSBR include: aPARP, PARP1, PARP2, PARG, XRCC1, DNA polymerase β, DNA polymerase delta, DNA polymerase epsilon, PCNA, LIG1, PNK, PNKP, APE1, APTX, APLF, TDP1, LIG3, FEN1, CtIP, MRN, and ERCC1.

[1002] MMR (Mismatch Repair)

[1003] Cells contain three excision repair pathways: MMR, BER, and NER. The excision repair pathways have a common feature in that they typically recognize a lesion on one strand of the DNA, then exo/endonucleases remove the lesion and leave a 1-30 nucleotide gap that is sub-sequentially filled in by DNA polymerase and finally sealed with ligase. A more complete picture is given in Li 2008, and a summary is provided here.

[1004] Mismatch Repair (MMR) Operates on Mispaired DNA Bases.

[1005] The MSH2/6 or MSH2/3 complexes both have ATPase activity that plays an important role in mismatch recognition and the initiation of repair. MSH2/6 preferentially recognizes base-base mismatches and identifies mispairs of 1 or 2 nucleotides, while MSH2/3 preferentially recognizes larger ID mispairs.

[1006] hMLH1 heterodimerizes with hPMS2 to form hMutLα which possesses an ATPase activity and is important for multiple steps of MMR. It possesses a PCNA/replication factor C (RFC)-dependent endonuclease activity which plays an important role in 3′ nick-directed MMR involving EXO1 (EXO1 is a participant in both HR and MMR). It regulates termination of mismatch-provoked excision. Ligase I is the relevant ligase for this pathway. Additional factors that may promote MMR include: EXO1, MSH2, MSH3, MSH6, MLH1, PMS2, MLH3, DNA Pol delta, RPA, HMGB1, RFC, and DNA ligase I.

[1007] Base Excision Repair (BER)

[1008] The base excision repair (BER) pathway is active throughout the cell cycle; it is responsible primarily for removing small, non-helix-distorting base lesions from the genome. In contrast, the related Nucleotide Excision Repair pathway (discussed in the next section) repairs bulky helix-distorting lesions. A more detailed explanation is given in Caldecott 2008, and a summary is given here.

[1009] Upon DNA base damage, base excision repair (BER) is initiated and the process can be simplified into five major steps: (a) removal of the damaged DNA base; (b) incision of the subsequent a basic site; (c) clean-up of the DNA ends; (d) insertion of the desired nucleotide into the repair gap; and (e) ligation of the remaining nick in the DNA backbone. These last steps are similar to the SSBR.

[1010] In the first step, a damage-specific DNA glycosylase excises the damaged base through cleavage of the N-glycosidic bond linking the base to the sugar phosphate backbone. Then AP endonuclease-1 (APE1) or bifunctional DNA glycosylases with an associated lyase activity incises the phosphodiester backbone to create a DNA single-strand break (SSB). The third step of BER involves cleaning-up of the DNA ends. The fourth step in BER is conducted by Pol β that adds a new complementary nucleotide into the repair gap and in the final step XRCC1/Ligase III seals the remaining nick in the DNA backbone. This completes the short-patch BER pathway in which the majority (˜80%) of damaged DNA bases are repaired. However, if the 5′-ends in step 3 are resistant to end processing activity, following one nucleotide insertion by Pol β there is then a polymerase switch to the replicative DNA polymerases, Pol δ/ε, which then add ˜2-8 more nucleotides into the DNA repair gap. This creates a 5′-flap structure, which is recognized and excised by flap endonuclease-1 (FEN-1) in association with the processivity factor proliferating cell nuclear antigen (PCNA). DNA ligase I then seals the remaining nick in the DNA backbone and completes long-patch BER. Additional factors that may promote the BER pathway include: DNA glycosylase, APE1, Polβ, Pol delta, Pol epsilon, XRCC1, Ligase III, FEN-1, PCNA, RECQL4, WRN, MYH, PNKP, and APTX.

[1011] Nucleotide Excision Repair (NER)

[1012] Nucleotide excision repair (NER) is an important excision mechanism that removes bulky helix-distorting lesions from DNA. Additional details about NER are given in Marteijn et al. 2014, and a summary is given here. NER a broad pathway encompassing two smaller pathways: global genomic NER (GG-NER) and transcription coupled repair NER (TC-NER). GG-NER and TC-NER use different factors for recognizing DNA damage. However, they utilize the same machinery for lesion incision, repair, and ligation.

[1013] Once damage is recognized, the cell removes a short single-stranded DNA segment that contains the lesion. Endonucleases XPF/ERCC1 and XPG (encoded by ERCC5) remove the lesion by cutting the damaged strand on either side of the lesion, resulting in a single-strand gap of 22-30 nucleotides. Next, the cell performs DNA gap filling synthesis and ligation. Involved in this process are: PCNA, RFC, DNA Pol δ, DNA Pol ε or DNA Pol κ, and DNA ligase I or XRCC1/Ligase III. Replicating cells tend to use DNA pol ε and DNA ligase I, while non-replicating cells tend to use DNA Pol δ, DNA Pol κ, and the XRCC1/Ligase III complex to perform the ligation step.

[1014] NER can involve the following factors: XPA-G, POLH, XPF, ERCC1, XPA-G, and LIG1. Transcription-coupled NER (TC-NER) can involve the following factors: CSA, CSB, XPB, XPD, XPG, ERCC1, and TTDA. Additional factors that may promote the NER repair pathway include XPA-G, POLH, XPF, ERCC1, XPA-G, LIG1, CSA, CSB, XPA, XPB, XPC, XPD, XPF, XPG, TTDA, UVSSA, USP7, CETN2, RAD23B, UV-DDB, CAK subcomplex, RPA, and PCNA.

[1015] Interstrand Crosslink (ICL)

[1016] A dedicated pathway called the ICL repair pathway repairs interstrand crosslinks. Interstrand crosslinks, or covalent crosslinks between bases in different DNA strand, can occur during replication or transcription. ICL repair involves the coordination of multiple repair processes, in particular, nucleolytic activity, translesion synthesis (TLS), and HDR. Nucleases are recruited to excise the ICL on either side of the crosslinked bases, while TLS and HDR are coordinated to repair the cut strands. ICL repair can involve the following factors: endonucleases, e.g., XPF and RAD51C, endonucleases such as RAD51, translesion polymerases, e.g., DNA polymerase zeta and Revl, and the Fanconi anemia (FA) proteins, e.g., FancJ.

[1017] Other Pathways

[1018] Several other DNA repair pathways exist in mammals.

[1019] Translesion synthesis (TLS) is a pathway for repairing a single stranded break left after a defective replication event and involves translesion polymerases, e.g., DNA pol and Revl.

[1020] Error-free postreplication repair (PRR) is another pathway for repairing a single stranded break left after a defective replication event.

[1021] V.6 Examples of gRNAs in Genome Editing Methods

[1022] gRNA molecules as described herein can be used with Cas9 molecules that generate a double-strand break or a single-strand break to alter the sequence of a target nucleic acid, e.g., a target position or target genetic signature. gRNA molecules useful in these methods are described below.

[1023] In certain embodiments, the gRNA, e.g., a chimeric gRNA, is configured such that it comprises one or more of the following properties;

[1024] a) it can position, e.g., when targeting a Cas9 molecule that makes double-strand breaks, a double-strand break (i) within 50, 100, 150, 200, 250, 300, 350, 400, 450, or 500 nucleotides of a target position, or (ii) sufficiently close that the target position is within the region of end resection;

[1025] b) it has a targeting domain of at least 16 nucleotides, e.g., a targeting domain of (i) 16, (ii), 17, (iii) 18, (iv) 19, (v) 20, (vi) 21, (vii) 22, (viii) 23, (ix) 24, (x) 25, or (xi) 26 nucleotides; and

[1026] (c)(i) the proximal and tail domain, when taken together, comprise at least 15, 18, 20, 25, 30, 31, 35, 40, 45, 49, 50, or 53 nucleotides, e.g., at least 15, 18, 20, 25, 30, 31, 35, 40, 45, 49, 50, or 53 nucleotides from a naturally occurring S. pyogenes or S. aureus, tail and proximal domain, or a sequence that differs by no more than 1, 2, 3, 4, 5, 6, 7, 8, 9, or 10 nucleotides therefrom;

[1027] (c)(ii) there are at least 15, 18, 20, 25, 30, 31, 35, 40, 45, 49, 50, or 53 nucleotides 3′ to the last nucleotide of the second complementarity domain, e.g., at least 15, 18, 20, 25, 30, 31, 35, 40, 45, 49, 50, or 53 nucleotides from the corresponding sequence of a naturally occurring S. pyogenes or S. aureus gRNA, or a sequence that differs by no more than 1, 2, 3, 4, 5, 6, 7, 8, 9, or 10 nucleotides therefrom;

[1028] (c)(iii) there are at least 16, 19, 21, 26, 31, 32, 36, 41, 46, 50, 51, or 54 nucleotides 3′ to the last nucleotide of the second complementarity domain that is complementary to its corresponding nucleotide of the first complementarity domain, e.g., at least 16, 19, 21, 26, 31, 32, 36, 41, 46, 50, 51, or 54 nucleotides from the corresponding sequence of a naturally occurring S. pyogenes or S. aureus gRNA, or a sequence that differs by no more than 1, 2, 3, 4, 5, 6, 7, 8, 9, or 10 nucleotides therefrom;

[1029] (c)(iv) the tail domain is at least 10, 15, 20, 25, 30, 35 or 40 nucleotides in length, e.g., it comprises at least 10, 15, 20, 25, 30, 35 or 40 nucleotides from a naturally occurring S. pyogenes or S. aureus tail domain, or a sequence that differs by no more than 1, 2, 3, 4, 5, 6, 7, 8, 9, or 10 nucleotides therefrom; or

[1030] (c)(v) the tail domain comprises 15, 20, 25, 30, 35, 40 nucleotides or all of the corresponding portions of a naturally occurring tail domain, e.g., a naturally occurring S. pyogenes or S. aureus tail domain.

[1031] In certain embodiments, the gRNA is configured such that it comprises properties a and b(i); a and b(ii); a and b(iii); a and b(iv); a and b(v); a and b(vi); a and b(vii); a and b(viii); a and b(ix); a and b(x); a and b(xi); a and c; a, b, and c; a(i), b(i), and c(i); a(i), b(i), and c(ii); a(i), b(ii), and c(i); a(i), b(ii), and c(ii); a(i), b(iii), and c(i); a(i), b(iii), and c(ii); a(i), b(iv), and c(i); a(i), b(iv), and c(ii); a(i), b(v), and c(i); a(i), b(v), and c(ii); a(i), b(vi), and c(i); a(i), b(vi), and c(ii); a(i), b(vii), and c(i); a(i), b(vii), and c(ii); a(i), b(viii), and c(i); a(i), b(viii), and c(ii); a(i), b(ix), and c(i); a(i), b(ix), and c(ii); a(i), b(x), and c(i); a(i), b(x), and c(ii); a(i), b(xi), or c(i); a(i), b(xi), and c(ii).

[1032] In certain embodiments, the gRNA, e.g., a chimeric gRNA, is configured such that it comprises one or more of the following properties:

[1033] (a) one or both of the gRNAs can position, e.g., when targeting a Cas9 molecule that makes single-strand breaks, a single-strand break within (i) 50, 100, 150, 200, 250, 300, 350, 400, 450, or 500 nucleotides of a target position, or (ii) sufficiently close that the target position is within the region of end resection;

[1034] (b) one or both have a targeting domain of at least 16 nucleotides, e.g., a targeting domain of (i) 16, (ii), 17, (iii) 18, (iv) 19, (v) 20, (vi) 21, (vii) 22, (viii) 23, (ix) 24, (x) 25, or (xi) 26 nucleotides; and

[1035] (c)(i) the proximal and tail domain, when taken together, comprise at least 15, 18, 20, 25, 30, 31, 35, 40, 45, 49, 50, or 53 nucleotides, e.g., at least 15, 18, 20, 25, 30, 31, 35, 40, 45, 49, 50, or 53 nucleotides from a naturally occurring S. pyogenes or S. aureus tail and proximal domain, or a sequence that differs by no more than 1, 2, 3, 4, 5, 6, 7, 8, 9, or 10 nucleotides therefrom;

[1036] (c)(ii) there are at least 15, 18, 20, 25, 30, 31, 35, 40, 45, 49, 50, or 53 nucleotides 3′ to the last nucleotide of the second complementarity domain, e.g., at least 15, 18, 20, 25, 30, 31, 35, 40, 45, 49, 50, or 53 nucleotides from the corresponding sequence of a naturally occurring S. pyogenes, or S. aureus gRNA, or a sequence that differs by no more than 1, 2, 3, 4, 5, 6, 7, 8, 9, or 10 nucleotides therefrom;

[1037] (c)(iii) there are at least 16, 19, 21, 26, 31, 32, 36, 41, 46, 50, 51, or 54 nucleotides 3′ to the last nucleotide of the second complementarity domain that is complementary to its corresponding nucleotide of the first complementarity domain, e.g., at least 16, 19, 21, 26, 31, 32, 36, 41, 46, 50, 51, or 54 nucleotides from the corresponding sequence of a naturally occurring S. pyogenes or S. aureus gRNA, or a sequence that differs by no more than 1, 2, 3, 4, 5, 6, 7, 8, 9, or 10 nucleotides therefrom;

[1038] (c)(iv) the tail domain is at least 10, 15, 20, 25, 30, 35 or 40 nucleotides in length, e.g., it comprises at least 10, 15, 20, 25, 30, 35 or 40 nucleotides from a naturally occurring S. pyogenes, or S. aureus tail domain, or a sequence that differs by no more than 1, 2, 3, 4, 5, 6, 7, 8, 9, or 10 nucleotides therefrom; or

[1039] (c)(v) the tail domain comprises 15, 20, 25, 30, 35, 40 nucleotides or all of the corresponding portions of a naturally occurring tail domain, e.g., a naturally occurring S. pyogenes or S. aureus tail domain.

[1040] In certain embodiments, the gRNA is configured such that it comprises properties: a and b(i); a and b(ii); a and b(iii); a and b(iv); a and b(v); a and b(vi); a and b(vii); a and b(viii); a and b(ix); a and b(x); a and b(xi); a and c; a, b, and c; a(i), b(i), and c(i); a(i), b(i), and c(ii); a(i), b(ii), and c(i); a(i), b(ii), and c(ii); a(i), b(iii), and c(i); a(i), b(iii), and c(ii); a(i), b(iv), and c(i); a(i), b(iv), and c(ii); a(i), b(v), and c(i); a(i), b(v), and c(ii); a(i), b(vi), and c(i); a(i), b(vi), and c(ii); a(i), b(vii), and c(i); a(i), b(vii), and c(ii); a(i), b(viii), and c(i); a(i), b(viii), and c(ii); a(i), b(ix), and c(i); a(i), b(ix), and c(ii); a(i), b(x), and c(i); a(i), b(x), and c(ii); a(i), b(xi), and c(i); or a(i), b(xi), and c(ii).

[1041] In certain embodiments, the gRNA is used with a Cas9 nickase molecule having HNH activity, e.g., a Cas9 molecule having the RuvC activity inactivated, e.g., a Cas9 molecule having a mutation at D10, e.g., the D10A mutation.

[1042] In an embodiment, the gRNA is used with a Cas9 nickase molecule having RuvC activity, e.g., a Cas9 molecule having the HNH activity inactivated, e.g., a Cas9 molecule having a mutation at 840, e.g., the H840A.

[1043] In an embodiment, the gRNAs are used with a Cas9 nickase molecule having RuvC activity, e.g., a Cas9 molecule having the HNH activity inactivated, e.g., a Cas9 molecule having a mutation at N863, e.g., the N863A mutation.

[1044] In embodiment, a pair of gRNAs, e.g., a pair of chimeric gRNAs, comprising a first and a second gRNA, is configured such that they comprises one or more of the following properties:

[1045] a) one or both of the gRNA molecules can position, e.g., when targeting a Cas9 molecule that makes single-strand breaks, a single-strand break within (i) 50, 100, 150, 200, 250, 300, 350, 400, 450, or 500 nucleotides of a target position, or (ii) sufficiently close that the target position is within the region of end resection;

[1046] b) one or both have a targeting domain of at least 16 nucleotides, e.g., a targeting domain of (i) 16, (ii), 17, (iii) 18, (iv) 19, (v) 20, (vi) 21, (vii) 22, (viii) 23, (ix) 24, (x) 25, or (xi) 26 nucleotides;

[1047] (c)(i) the proximal and tail domain, when taken together, comprise at least 15, 18, 20, 25, 30, 31, 35, 40, 45, 49, 50, or 53 nucleotides, e.g., at least 15, 18, 20, 25, 30, 31, 35, 40, 45, 49, 50, or 53 nucleotides from a naturally occurring S. pyogenes or S. aureus tail and proximal domain, or a sequence that differs by no more than 1, 2, 3, 4, 5, 6, 7, 8, 9, or 10 nucleotides therefrom;

[1048] (c)(ii) there are at least 15, 18, 20, 25, 30, 31, 35, 40, 45, 49, 50, or 53 nucleotides 3′ to the last nucleotide of the second complementarity domain, e.g., at least 15, 18, 20, 25, 30, 31, 35, 40, 45, 49, 50, or 53 nucleotides from the corresponding sequence of a naturally occurring S. pyogenes or S. aureus gRNA, or a sequence that differs by no more than 1, 2, 3, 4, 5, 6, 7, 8, 9, or 10 nucleotides therefrom;

[1049] (c)(iii) there are at least 16, 19, 21, 26, 31, 32, 36, 41, 46, 50, 51, or 54 nucleotides 3′ to the last nucleotide of the second complementarity domain that is complementary to its corresponding nucleotide of the first complementarity domain, e.g., at least 16, 19, 21, 26, 31, 32, 36, 41, 46, 50, 51, or 54 nucleotides from the corresponding sequence of a naturally occurring S. pyogenes or S. aureus gRNA, or a sequence that differs by no more than 1, 2, 3, 4, 5, 6, 7, 8, 9, or 10 nucleotides therefrom;

[1050] (c)(iv) the tail domain is at least 10, 15, 20, 25, 30, 35 or 40 nucleotides in length, e.g., it comprises at least 10, 15, 20, 25, 30, 35 or 40 nucleotides from a naturally occurring S. pyogenes or S. aureus tail domain; or, or a sequence that differs by no more than 1, 2, 3, 4, 5, 6, 7, 8, 9, or 10 nucleotides therefrom; or

[1051] (c)(v) the tail domain comprises 15, 20, 25, 30, 35, or 40 nucleotides or all of the corresponding portions of a naturally occurring tail domain, e.g., a naturally occurring S. pyogenes or S. aureus tail domain;

[1052] (d) the gRNAs are configured such that, when hybridized to target nucleic acid, they are separated by 0-50, 0-100, 0-200, at least 10, at least 20, at least 30 or at least 50 nucleotides;

[1053] (e) the breaks made by the first gRNA and second gRNA are on different strands; and

[1054] (f) the PAMs are facing outwards.

[1055] In certain embodiments, one or both of the gRNAs is configured such that it comprises properties a and b(i); a and b(ii); a and b(iii); a and b(iv); a and b(v); a and b(vi); a and b(vii); a and b(viii); a and b(ix); a and b(x); a and b(xi); a and c; a, b, and c; a(i), b(i), and c(i); a(i), b(i), and c(ii); a(i), b(i), c, and d; a(i), b(i), c, and e; a(i), b(i), c, d, and e; a(i), b(ii), and c(i); a(i), b(ii), and c(ii); a(i), b(ii), c, and d; a(i), b(ii), c, and e; a(i), b(ii), c, d, and e; a(i), b(iii), and c(i); a(i), b(iii), and c(ii); a(i), b(iii), c, and d; a(i), b(iii), c, and e; a(i), b(iii), c, d, and e; a(i), b(iv), and c(i); a(i), b(iv), and c(ii); a(i), b(iv), c, and d; a(i), b(iv), c, and e; a(i), b(iv), c, d, and e; a(i), b(v), and c(i); a(i), b(v), and c(ii); a(i), b(v), c, and d; a(i), b(v), c, and e; a(i), b(v), c, d, and e; a(i), b(vi), and c(i); a(i), b(vi), and c(ii); a(i), b(vi), c, and d; a(i), b(vi), c, and e; a(i), b(vi), c, d, and e; a(i), b(vii), and c(i); a(i), b(vii), and c(ii); a(i), b(vii), c, and d; a(i), b(vii), c, and e; a(i), b(vii), c, d, and e; a(i), b(viii), and c(i); a(i), b(viii), and c(ii); a(i), b(viii), c, and d; a(i), b(viii), c, and e; a(i), b(viii), c, d, and e; a(i), b(ix), and c(i); a(i), b(ix), and c(ii); a(i), b(ix), c, and d; a(i), b(ix), c, and e; a(i), b(ix), c, d, and e; a(i), b(x), and c(i); a(i), b(x), and c(ii); a(i), b(x), c, and d; a(i), b(x), c, and e; a(i), b(x), c, d, and e; a(i), b(xi), and c(i); a(i), b(xi), and c(ii); a(i), b(xi), c, and d; a(i), b(xi), c, and e; or a(i), b(xi), c, d, and e.

[1056] In certain embodiments, the gRNAs are used with a Cas9 nickase molecule having HNH activity, e.g., a Cas9 molecule having the RuvC activity inactivated, e.g., a Cas9 molecule having a mutation at D10, e.g., the D10A mutation.

[1057] In certain embodiments, the gRNAs are used with a Cas9 nickase molecule having RuvC activity, e.g., a Cas9 molecule having the HNH activity inactivated, e.g., a Cas9 molecule having a mutation at H840, e.g., the H840A mutation.

[1058] In certain embodiments, the gRNAs are used with a Cas9 nickase molecule having RuvC activity, e.g., a Cas9 molecule having the HNH activity inactivated, e.g., a Cas9 molecule having a mutation at N863, e.g., the N863A mutation.

### VI. Target Cells

[1059] Cas9 molecules and gRNA molecules, e.g., a Cas9 molecule/gRNA molecule complex, can be used to manipulate a cell, e.g., to edit a target nucleic acid, in a wide variety of cells. Additional details on types of cells that can be manipulated may be found in the section entitled “VIIA. TARGETS: CELLS” of PCT Application WO 2015/048577, the entire contents of which are expressly incorporated herein by reference.

[1060] In certain embodiments, a cell is manipulated by editing (e.g., introducing a mutation in) a target gene (e.g., a HBB gene) as described herein. In one embodiment, a cell, or a population of cells, is manipulated by editing one or more non-coding sequences, e.g., an alteration in an intron or in a 5′ or 3′ non-translated or non-transcribed region. In one embodiment, a cell, or a population of cells, is manipulated by editing the sequence of a control element, e.g., a promoter, enhancer, or a cis-acting or trans-acting control element. In one embodiment, a cell, or a population of cells, is manipulated by editing one or more coding sequences, e.g., an alteration in an exon. In some embodiments, a cell, or a population of cells, is manipulated in vitro. In other embodiments, a cell, or a population of cells, is manipulated ex vivo. In some embodiments, a cell, or a population of cells, is manipulated in vivo. In some embodiments, the expression of one or more target genes (e.g., one or more target genes described herein) is modulated, e.g., in vivo. In other embodiments, the expression of one or more target genes (e.g., one or more target genes described herein) is modulated, e.g., ex vivo. In other embodiments, the expression of one or more target genes (e.g., one or more target genes described herein) is modulated, e.g., in vitro.

[1061] In one embodiment, a cell, or a population of cells, is manipulated by editing (e.g., inducing a mutation in) the HBB target gene, e.g., as described herein. In one embodiment, the expression of the HBB target gene is modulated, e.g., in vivo. In another embodiment, the expression of the HBB target gene is modulated, e.g., ex vivo.

[1062] The Cas9 and gRNA molecules described herein can be delivered to a target cell. In certain embodiments, the target cell is an erythroid cell, e.g., an erythroblast. In certain embodiments, erythroid cells are preferentially targeted, e.g., at least about 90%, 95%, 96%, 97%, 98%, 99%, or 100% of the targeted cells are erythroid cells. For example, in the case of in vivo delivery, erythroid cells are preferentially targeted, and if cells are treated ex vivo and returned to the subject, erythroid cells are preferentially modified. In certain embodiments, the target cell is a circulating blood cell, e.g., a reticulocyte, megakaryocyte erythroid progenitor (MEP) cell, myeloid progenitor cell (CMP/GMP), lymphoid progenitor (LP) cell, hematopoietic stem/progenitor cell (HSC), or endothelial cell (EC). In certain embodiments, the target cell is a bone marrow cell (e.g., a reticulocyte, an erythroid cell (e.g., erythroblast), an MEP cell, myeloid progenitor cell (CMP/GMP), LP cell, erythroid progenitor (EP) cell, HSC, multipotent progenitor (MPP) cell, endothelial cell (EC), hemogenic endothelial (HE) cell, or mesenchymal stem cell). In certain embodiments, the target cell is a myeloid progenitor cell (e.g., a common myeloid progenitor (CMP) cell or granulocyte macrophage progenitor (GMP) cell). In certain embodiments, the target cell is a lymphoid progenitor cell, e.g., a common lymphoid progenitor (CLP) cell. In certain embodiments, the target cell is an erythroid progenitor cell (e.g., an MEP cell). In certain embodiments, the target cell is a hematopoietic stem/progenitor cell (e.g., a long term HSC (LT-HSC), short term HSC (ST-HSC), MPP cell, or lineage restricted progenitor (LRP) cell). In certain embodiments, the target cell is a CD34⁺ cell, CD34⁺CD90⁺ cell, CD34⁺CD38⁻ cell, CD34⁺CD90⁺CD49f⁺CD38⁻CD45RA⁻ cell, CD105⁺ cell, CD31⁺, or CD133⁺ cell, or a CD34⁺CD90⁺ CD133⁺ cell. In certain embodiments, the target cell is an umbilical cord blood CD34⁺ HSPC, umbilical cord venous endothelial cell, umbilical cord arterial endothelial cell, amniotic fluid CD34⁺ cell, amniotic fluid endothelial cell, placental endothelial cell, or placental hematopoietic CD34⁺ cell. In certain embodiments, the target cell is a mobilized peripheral blood hematopoietic CD34⁺ cell (after the patient is treated with a mobilization agent, e.g., G-CSF or Plerixafor). In certain embodiments, the target cell is a peripheral blood endothelial cell.

[1063] In certain embodiments, a target cell is manipulated ex vivo by editing (e.g., inducing a mutation in) the HBB gene and/or modulating the expression of the HBB target gene, then the target cell is administered to the subject. Sources of target cells for ex vivo manipulation may include, for example, the subject's blood, cord blood, or marrow. Other sources of target cells for ex vivo manipulation may include, for example, heterologous donor blood, cord blood, or bone marrow.

[1064] In certain embodiments, an erythrocyte is removed from a subject, manipulated ex vivo as described above, and the erythrocyte is returned to the subject. In other embodiments, a hematopoietic stem cell is removed from a subject, manipulated ex vivo as described above, and the hematopoietic stem cell is returned to the subject. In certain embodiments, an erythroid progenitor cell is removed from a subject, manipulated ex vivo as described above, and the erythroid progenitor cell is returned to the subject. In certain embodiments, an myeloid progenitor cell is removed from a subject, manipulated ex vivo as described above, and the myeloid progenitor cell is returned to the subject. In certain embodiments, a hematopoietic stem/progenitor cell (HSC) is removed from a subject, manipulated ex vivo as described above, and returned to the subject. In certain embodiments, a CD34⁺ HSC is removed from a subject, manipulated ex vivo as described above, and returned to the subject.

[1065] In certain embodiments wherein modified HSCs generated ex vivo are administered to a subject without myeloablative pre-conditioning. In other embodiments, the modified HSCs are administered after mild myeloblative conditioning such that, followed engraftment, some of the hematopoietic cells are derived from the modified HSCs. In still other embodiments, the modified HSCs are administered after full myeloblation such that, following engraftment, 100% of the hematopoietic cells are derived from the modified HSCs.

[1066] A suitable cell can also include a stem cell such as, by way of example, an embryonic stem cell, induced pluripotent stem cell, hematopoietic stem cell, or hemogenic endothelial (HE) cell (precursor to both hematopoietic stem cells and endothelial cells). In certain embodiments, the cell is an induced pluripotent stem (iPS) cell or a cell derived from an iPS cell, e.g., an iPS cell generated from the subject, modified using methods disclosed herein and differentiated into a clinically relevant cell such as e.g., an erythrocyte. In an embodiment, AAV is used to transduce the target cells, e.g., the target cells described herein.

[1067] Cells produced by the methods described herein may be used immediately. Alternatively, the cells may be frozen (e.g., in liquid nitrogen) and stored for later use. The cells will usually be frozen in 10% dimethylsulfoxide (DMSO), 50% serum, 40% buffered medium, or some other such solution as is commonly used in the art to preserve cells at such freezing temperature and thawed in such a manner as commonly known in the art for thawing frozen cultured cells. Cells may also be thermostabilized for prolonged storage at 4° C.

### VII. Delivery, Formulations and Routes of Administration

[1068] The components, e.g., a Cas9 molecule and gRNA molecule (e.g., a Cas9 molecule/gRNA molecule complex), and a donor template nucleic acid, or all three, can be delivered, formulated, or administered, in a variety of forms, see, e.g., Tables 6-7. In certain embodiments, one Cas9 molecule and two or more (e.g., 2, 3, 4, or more) different gRNA molecules are delivered, e.g., by an AAV vector. In certain embodiments, the sequence encoding the Cas9 molecule and the sequence(s) encoding the two or more (e.g., 2, 3, 4, or more) different gRNA molecules are present on the same nucleic acid molecule, e.g., an AAV vector. When a Cas9 or gRNA component is delivered encoded in DNA, the DNA will typically include a control region, e.g., comprising a promoter, to effect expression. Useful promoters for Cas9 molecule sequences include CMV, SFFV, EFS, EF-1a, PGK, CAG, and CBH promoters, or a blood cell specific promoter. In an embodiment, the promoter is a constitutive promoter. In another embodiment, the promoter is a tissue specific promoter. Useful promoters for gRNAs include T7, H1, EF-1a, U6, U1, and tRNA promoters. Promoters with similar or dissimilar strengths can be selected to tune the expression of components. Sequences encoding a Cas9 molecule can comprise a nuclear localization signal (NLS), e.g., an SV40 NLS. In an embodiment, the sequence encoding a Cas9 molecule comprises at least two nuclear localization signals. In an embodiment a promoter for a Cas9 molecule or a gRNA molecule can be, independently, inducible, tissue specific, or cell specific.

[1069] Table 6 provides examples of how the components can be formulated, delivered, or administered.

TABLE 6
Elements

| | | Optional | |
|---|---|---|---|
| | | Donor | |
| Cas9 | gRNA | Template | |
| Molecule(s) | Molecule(s) | Nucleic Acid | Comments |
| DNA | DNA | DNA | In this embodiment, a Cas9 molecule, typically |
| | | | an eaCas9 molecule, and a gRNA molecule are |
| | | | transcribed from DNA. In this embodiment, |
| | | | they are encoded on separate molecules. In this |
| | | | embodiment, the donor template is provided as a |
| | | | separate DNA molecule. |
| DNA | DNA | | In this embodiment, a Cas9 molecule, typically |
| | | | an eaCas9 molecule, and a gRNA molecule are |
| | | | transcribed from DNA. In this embodiment, |
| | | | they are encoded on separate molecules. In this |
| | | | embodiment, the donor template is provided on |
| | | | the same DNA molecule that encodes the gRNA |
| | | | molecule. |
| DNA | | DNA | In this embodiment, a Cas9 molecule, typically |
| | | | an eaCas9 molecule, and a gRNA molecule are |
| | | | transcribed from DNA, here from a single |
| | | | molecule. In this embodiment, the donor |
| | | | template is provided as a separate DNA |
| | | | molecule. |
| DNA | DNA | DNA | In this embodiment, a Cas9 molecule, typically |
| | | | an eaCas9 molecule, and a gRNA molecule are |
| | | | transcribed from DNA. In this embodiment, |
| | | | they are encoded on separate molecules. In this |
| | | | embodiment, the donor template is provided on |
| | | | the same DNA molecule that encodes the Cas9 |
| | | | molecule. |
| DNA | RNA | DNA | In this embodiment, a Cas9 molecule, typically |
| | | | an eaCas9 molecule, is transcribed from DNA, |
| | | | and a gRNA molecule is provided as in vitro |
| | | | transcribed or synthesized RNA. In this |
| | | | embodiment, the donor template is provided as a |
| | | | separate DNA molecule. |
| DNA | RNA | DNA | In this embodiment, a Cas9 molecule, typically |
| | | | an eaCas9 molecule, is transcribed from DNA, |
| | | | and a gRNA molecule is provided as in vitro |
| | | | transcribed or synthesized RNA. In this |
| | | | embodiment, the donor template is provided on |
| | | | the same DNA molecule that encodes the Cas9 |
| | | | molecule. |
| mRNA | RNA | DNA | In this embodiment, a Cas9 molecule, typically |
| | | | an eaCas9 molecule, is translated from in vitro |
| | | | transcribed mRNA, and a gRNA molecule is |
| | | | provided as in vitro transcribed or synthesized |
| | | | RNA. In this embodiment, the donor template is |
| | | | provided as a DNA molecule. |
| mRNA | DNA | DNA | In this embodiment, a Cas9 molecule, typically |
| | | | an eaCas9 molecule, is translated from in vitro |
| | | | transcribed mRNA, and a gRNA molecule is |
| | | | transcribed from DNA. In this embodiment, the |
| | | | donor template is provided as a separate DNA |
| | | | molecule. |
| mRNA | DNA | | In this embodiment, a Cas9 molecule, typically |
| | | | an eaCas9 molecule, is translated from in vitro |
| | | | transcribed mRNA, and a gRNA molecule is |
| | | | transcribed from DNA. In this embodiment, the |
| | | | donor template is provided on the same DNA |
| | | | molecule that encodes the gRNA molecule. |
| Protein | DNA | DNA | In this embodiment, a Cas9 molecule, typically |
| | | | an eaCas9 molecule, is provided as a protein, |
| | | | and a gRNA molecule is transcribed from |
| | | | DNA. In this embodiment, the donor template |
| | | | is provided as a separate DNA molecule. |
| Protein | DNA | | In this embodiment, a Cas9 molecule, typically |
| | | | an eaCas9 molecule, is provided as a protein, |
| | | | and a gRNA is transcribed from DNA. In this |
| | | | embodiment, the donor template is provided on |
| | | | the same DNA molecule that encodes the gRNA |
| | | | molecule. |
| Protein | RNA | DNA | In this embodiment, an eaCas9 molecule is |
| | | | provided as a protein, and a gRNA molecule is |
| | | | provided as transcribed or synthesized RNA. In |
| | | | this embodiment, the donor template is provided |
| | | | as a DNA molecule. |

[1070] Table 7 summarizes various delivery methods for the components of a Cas system, e.g., the Cas9 molecule component and the gRNA molecule component, as described herein.

TABLE 7

| | | Delivery | | | |
|---|---|---|---|---|---|
| | | into Non- | Duration | | Type of |
| | | Dividing | of | Genome | Molecule |
| Delivery Vector/Mode | | Cells | Expression | Integration | Delivered |
| Physical (e.g., | | YES | Transient | NO | Nucleic Acids |
| electroporation, particle gun, | | | | | and Proteins |
| calcium phosphate | | | | | |
| transfection, cell compression | | | | | |
| or squeezing) | | | | | |
| Viral | Retrovirus | NO | Stable | YES | RNA |
| | Lentivirus | YES | Stable | YES/NO with | RNA |
| | | | | modifications | |
| | Adenovirus | YES | Transient | NO | DNA |
| | Adeno- | YES | Stable | NO | DNA |
| | Associated | | | | |
| | Virus (AAV) | | | | |
| | Vaccinia Virus | YES | Very | NO | DNA |
| | | | Transient | | |
| | Herpes Simplex | YES | Stable | NO | DNA |
| | Virus | | | | |
| Non-Viral | Cationic | YES | Transient | Depends on | Nucleic Acids |
| | Liposomes | | | what is | and Proteins |
| | | | | delivered | |
| | Polymeric | YES | Transient | Depends on | Nucleic Acids |
| | Nanoparticles | | | what is | and Proteins |
| | | | | delivered | |
| Biological | Attenuated | YES | Transient | NO | Nucleic Acids |
| Non-Viral | Bacteria | | | | |
| Delivery | Engineered | YES | Transient | NO | Nucleic Acids |
| Vehicles | Bacteriophages | | | | |
| | Mammalian | YES | Transient | NO | Nucleic Acids |
| | Virus-like | | | | |
| | Particles | | | | |
| | Biological | YES | Transient | NO | Nucleic Acids |
| | liposomes: | | | | |
| | Erythrocyte | | | | |
| | Ghosts and | | | | |
| | Exosomes | | | | |

DNA-Based Delivery of a Cas9 Molecule and/or One or More gRNA Molecule and/or a Donor Template

[1071] Nucleic acids encoding Cas9 molecules (e.g., eaCas9 molecules), gRNA molecules, donor template nucleic acid, or any combination (e.g., two or all) thereof, can be administered to subjects or delivered into cells by art-known methods or as described herein. For example, Cas9-encoding and/or gRNA-encoding DNA, as well as donor template nucleic acids, can be delivered by, e.g., vectors (e.g., viral or non-viral vectors), non-vector based methods (e.g., using naked DNA or DNA complexes), or a combination thereof.

[1072] Nucleic acids encoding Cas9 molecules (e.g., eaCas9 molecules) and/or gRNA molecules can be conjugated to molecules (e.g., N-acetylgalactosamine) promoting uptake by the target cells (e.g., erythrocytes, HSCs). Donor template molecules can likewise be conjugated to molecules (e.g., N-acetylgalactosamine) promoting uptake by the target cells (e.g., erythrocytes, HSCs).

[1073] In some embodiments, the Cas9- and/or gRNA-encoding DNA is delivered by a vector (e.g., viral vector/virus or plasmid).

[1074] Vectors can comprise a sequence that encodes a Cas9 molecule and/or a gRNA molecule and/or a donor template with high homology to the region (e.g., target sequence) being targeted. In certain embodiments, the donor template comprises all or part of a target sequence.

[1075] Exemplary donor templates are a repair template, e.g., a gene correction template, or a gene mutation template, e.g., point mutation (e.g., single nucleotide (nt) substitution) template. A vector can also comprise a sequence encoding a signal peptide (e.g., for nuclear localization, nucleolar localization, or mitochondrial localization), fused, e.g., to a Cas9 molecule sequence. For example, the vectors can comprise a nuclear localization sequence (e.g., from SV40) fused to the sequence encoding the Cas9 molecule.

[1076] One or more regulatory/control elements, e.g., promoters, enhancers, introns, polyadenylation signals, Kozak consensus sequences, internal ribosome entry sites (IRES), can be included in the vectors. In some embodiments, the promoter is recognized by RNA polymerase II (e.g., a CMV promoter). In other embodiments, the promoter is recognized by RNA polymerase III (e.g., a U6 promoter). In some embodiments, the promoter is a regulated promoter (e.g., inducible promoter). In other embodiment, the promoter is a constitutive promoter. In some embodiments, the promoter is a tissue specific promoter. In other embodiments, the promoter is a viral promoter. In some embodiments, the promoter is a non-viral promoter.

[1077] In some embodiments, the vector is a viral vector (e.g., for generation of recombinant viruses). In some embodiments, the virus is a DNA virus (e.g., dsDNA or ssDNA virus). In other embodiments, the virus is an RNA virus (e.g., an ssRNA virus). In some embodiments, the virus infects dividing cells. In other embodiments, the virus infects non-dividing cells. Exemplary viral vectors/viruses include, e.g., retroviruses, lentiviruses, adenovirus, adeno-associated virus (AAV), vaccinia viruses, poxviruses, and herpes simplex viruses.

[1078] In some embodiments, the virus infects both dividing and non-dividing cells. In some embodiments, the virus can integrate into the host genome. In some embodiments, the virus is engineered to have reduced immunity, e.g., in human. In some embodiments, the virus is replication-competent. In other embodiments, the virus is replication-defective, e.g., having one or more coding regions for the genes necessary for additional rounds of virion replication and/or packaging replaced with other genes or deleted. In some embodiments, the virus causes transient expression of the Cas9 molecule and/or the gRNA molecule. In other embodiments, the virus causes long-lasting, e.g., at least 1 week, 2 weeks, 1 month, 2 months, 3 months, 6 months, 9 months, 1 year, 2 years, or permanent expression, of the Cas9 molecule and/or the gRNA molecule. The packaging capacity of the viruses may vary, e.g., from at least about 4 kb to at least about 30 kb, e.g., at least about 5 kb, 10 kb, 15 kb, 20 kb, 25 kb, 30 kb, 35 kb, 40 kb, 45 kb, or 50 kb.

[1079] In an embodiment, the viral vector recognizes a specific cell type or tissue. For example, the viral vector can be pseudotyped with a different/alternative viral envelope glycoprotein; engineered with a cell type-specific receptor (e.g., genetic modification(s) of one or more viral envelope glycoproteins to incorporate a targeting ligand such as a peptide ligand, a single chain antibody, or a growth factor); and/or engineered to have a molecular bridge with dual specificities with one end recognizing a viral glycoprotein and the other end recognizing a moiety of the target cell surface (e.g., a ligand-receptor, monoclonal antibody, avidin-biotin and chemical conjugation).

[1080] In some embodiments, the Cas9- and/or gRNA-encoding nucleic acid sequence is delivered by a recombinant retrovirus. In some embodiments, the retrovirus (e.g., Moloney murine leukemia virus) comprises a reverse transcriptase, e.g., that allows integration into the host genome. In some embodiments, the retrovirus is replication-competent. In other embodiments, the retrovirus is replication-defective, e.g., having one of more coding regions for the genes necessary for additional rounds of virion replication and packaging replaced with other genes, or deleted.

[1081] In an embodiment, the Cas9- and/or gRNA-encoding nucleic acid sequence is delivered by a recombinant lentivirus. In an embodiment, the donor template nucleic acid is delivered by a recombinant lentivirus. For example, the lentivirus is replication-defective, e.g., does not comprise one or more genes required for viral replication.

[1082] In some embodiments, the Cas9- and/or gRNA-encoding nucleic acid sequence is delivered by a recombinant adenovirus. In an embodiment, the donor template nucleic acid is delivered by a recombinant adenovirus. In some embodiments, the adenovirus is engineered to have reduced immunity in human.

[1083] In some embodiments, the Cas9- and/or gRNA-encoding nucleic acid sequence is delivered by a recombinant AAV. In an embodiment, the donor template nucleic acid is delivered by a recombinant AAV. In some embodiments, the AAV does not incorporate its genome into that of a host cell, e.g., a target cell as describe herein. In some embodiments, the AAV can incorporate its genome into that of a host cell. In some embodiments, the AAV is a self-complementary adeno-associated virus (scAAV), e.g., a scAAV that packages both strands which anneal together to form double stranded DNA.

[1084] In an embodiment, an AAV capsid that can be used in the methods described herein is a capsid sequence from serotype AAV1, AAV2, AAV3, AAV4, AAV5, AAV6, AAV7, AAV8, AAV9, AAV.rh8, AAV.rh10, AAV.rh32/33, AAV.rh43, AAV.rh64R1, or AAV7m8.

[1085] In an embodiment, the Cas9- and/or gRNA-encoding DNA is delivered in a re-engineered AAV capsid, e.g., with 50% or greater, e.g., 60% or greater, 70% or greater, 80% or greater, 90% or greater, or 95% or greater, sequence homology with a capsid sequence from serotypes AAV1, AAV2, AAV3, AAV4, AAV5, AAV6, AAV7, AAV8, AAV9, AAV.rh8, AAV.rh10, AAV.rh32/33, AAV.rh43, or AAV.rh64R1.

[1086] In an embodiment, the Cas9- and/or gRNA-encoding DNA is delivered by a chimeric AAV capsid. In an embodiment, the donor template nucleic acid is delivered by a chimeric AAV capsid. Exemplary chimeric AAV capsids include, but are not limited to, AAV9i1, AAV2i8, AAV-DJ, AAV2G9, AAV2i8G9, or AAV8G9.

[1087] In an embodiment, the AAV is a self-complementary adeno-associated virus (scAAV), e.g., a scAAV that packages both strands which anneal together to form double stranded DNA.

[1088] In some embodiments, the Cas9- and/or gRNA-encoding DNA is delivered by a hybrid virus, e.g., a hybrid of one or more of the viruses described herein. In an embodiment, the hybrid virus is hybrid of an AAV (e.g., of any AAV serotype), with a Bocavirus, B19 virus, porcine AAV, goose AAV, feline AAV, canine AAV, or MVM.

[1089] A packaging cell is used to form a virus particle that is capable of infecting a target cell. Exemplary packaging cells include 293 cells, which can package adenovirus, and ψ2 or PA317 cells, which can package retrovirus. A viral vector used in gene therapy is usually generated by a producer cell line that packages a nucleic acid vector into a viral particle. The vector typically contains the minimal viral sequences required for packaging and subsequent integration into a host or target cell (if applicable), with other viral sequences being replaced by an expression cassette encoding the protein to be expressed, e.g. Cas9. For example, an AAV vector used in gene therapy typically only possesses inverted terminal repeat (ITR) sequences from the AAV genome which are required for packaging and gene expression in the host or target cell. The missing viral functions can be supplied in trans by the packaging cell line and/or plasmid containing E2A, E4, and VA genes from adenovirus, and plasmid encoding Rep and Cap genes from AAV, as described in “Triple Transfection Protocol.” Henceforth, the viral DNA is packaged in a cell line, which contains a helper plasmid encoding the other AAV genes, namely rep and cap, but lacking ITR sequences. In certain embodiments, the viral DNA is packaged in a producer cell line, which contains E1A and/or E1B genes from adenovirus. The cell line is also infected with adenovirus as a helper. The helper virus (e.g., adenovirus or HSV) or helper plasmid promotes replication of the AAV vector and expression of AAV genes from the helper plasmid with ITRs. The helper plasmid is not packaged in significant amounts due to a lack of ITR sequences. Contamination with adenovirus can be reduced by, e.g., heat treatment to which adenovirus is more sensitive than AAV.

[1090] In certain embodiments, the viral vector is capable of cell type and/or tissue type recognition. For example, the viral vector can be pseudotyped with a different/alternative viral envelope glycoprotein; engineered with a cell type-specific receptor (e.g., genetic modification of the viral envelope glycoproteins to incorporate targeting ligands such as a peptide ligand, single chain antibody, or growth factor); and/or engineered to have a molecular bridge with dual specificities with one end recognizing a viral glycoprotein and the other end recognizing a moiety of the target cell surface (e.g., ligand-receptor, monoclonal antibody, avidin-biotin and chemical conjugation).

[1091] In certain embodiments, the viral vector achieves cell type specific expression. For example, a tissue-specific promoter can be constructed to restrict expression of the transgene (Cas9 and gRNA) to only the target cell. The specificity of the vector can also be mediated by microRNA-dependent control of transgene expression. In an embodiment, the viral vector has increased efficiency of fusion of the viral vector and a target cell membrane. For example, a fusion protein such as fusion-competent hemagglutin (HA) can be incorporated to increase viral uptake into cells. In an embodiment, the viral vector has the ability of nuclear localization. For example, a virus that requires the breakdown of the nuclear envelope (during cell division) and therefore will not infect a non-diving cell can be altered to incorporate a nuclear localization peptide in the matrix protein of the virus thereby enabling the transduction of non-proliferating cells.

[1092] In some embodiments, the Cas9- and/or gRNA-encoding DNA is delivered by a non-vector based method (e.g., using naked DNA or DNA complexes). For example, the DNA can be delivered, e.g., by organically modified silica or silicate (Ormosil), electroporation, transient cell compression or squeezing (see, e.g., Lee 2012), gene gun, sonoporation, magnetofection, lipid-mediated transfection, dendrimers, inorganic nanoparticles, calcium phosphates, or a combination thereof.

[1093] In an embodiment, delivery via electroporation comprises mixing the cells with the Cas9- and/or gRNA-encoding DNA in a cartridge, chamber or cuvette and applying one or more electrical impulses of defined duration and amplitude. In an embodiment, delivery via electroporation is performed using a system in which cells are mixed with the Cas9- and/or gRNA-encoding DNA in a vessel connected to a device (e.g., a pump) which feeds the mixture into a cartridge, chamber or cuvette wherein one or more electrical impulses of defined duration and amplitude are applied, after which the cells are delivered to a second vessel.

[1094] In some embodiments, the Cas9- and/or gRNA-encoding DNA is delivered by a combination of a vector and a non-vector based method. In an embodiment, the donor template nucleic acid is delivered by a combination of a vector and a non-vector based method. For example, virosomes combine liposomes with an inactivated virus (e.g., HIV or influenza virus), which can result in more efficient gene transfer, e.g., in respiratory epithelial cells than either viral or liposomal methods alone.

[1095] As described above, a nucleic acid may comprise (a) a sequence encoding a gRNA molecule comprising a targeting domain that is complementary with a target domain in the HBB gene, and (b) a sequence encoding a Cas9 molecule. In an embodiment, (a) and (b) are present on the same nucleic acid molecule, e.g., the same vector, e.g., the same viral vector, e.g., the same adeno-associated virus (AAV) vector. In an embodiment, the nucleic acid molecule is an AAV vector. Exemplary AAV vectors that may be used in any of the described compositions and methods include an AAV2 vector, a modified AAV2 vector, an AAV3 vector, a modified AAV3 vector, an AAV6 vector, a modified AAV6 vector, an AAV8 vector and an AAV9 vector. In another embodiment, (a) is present on a first nucleic acid molecule, e.g., a first vector, e.g., a first viral vector, e.g., a first AAV vector; and (b) is present on a second nucleic acid molecule, e.g., a second vector, e.g., a second vector, e.g., a second AAV vector. The first and second nucleic acid molecules may be AAV vectors. In yet another embodiment, the nucleic acid may further comprise (c) a sequence that encodes a second, third and/or fourth gRNA molecule as described herein. In an embodiment, the nucleic acid comprises (a), (b) and (c). Each of (a) and (c) may be present on the same nucleic acid molecule, e.g., the same vector, e.g., the same viral vector, e.g., the same adeno-associated virus (AAV) vector. In an embodiment, the nucleic acid molecule is an AAV vector.

[1096] In another embodiment, (a) and (c) are on different vectors. For example, (a) may be present on a first nucleic acid molecule, e.g., a first vector, e.g., a first viral vector, e.g., a first AAV vector; and (c) may be present on a second nucleic acid molecule, e.g., a second vector, e.g., a second vector, e.g., a second AAV vector. In an embodiment, the first and second nucleic acid molecules are AAV vectors. In yet another embodiment, each of (a), (b), and (c) are present on the same nucleic acid molecule, e.g., the same vector, e.g., the same viral vector, e.g., an AAV vector. In an embodiment, the nucleic acid molecule is an AAV vector. In an alternate embodiment, one of (a), (b), and (c) is encoded on a first nucleic acid molecule, e.g., a first vector, e.g., a first viral vector, e.g., a first AAV vector; and a second and third of (a), (b), and (c) is encoded on a second nucleic acid molecule, e.g., a second vector, e.g., a second vector, e.g., a second AAV vector. The first and second nucleic acid molecule may be AAV vectors.

[1097] In an embodiment, (a) is present on a first nucleic acid molecule, e.g., a first vector, e.g., a first viral vector, a first AAV vector; and (b) and (c) are present on a second nucleic acid molecule, e.g., a second vector, e.g., a second vector, e.g., a second AAV vector. The first and second nucleic acid molecule may be AAV vectors. In another embodiment, (b) is present on a first nucleic acid molecule, e.g., a first vector, e.g., a first viral vector, e.g., a first AAV vector; and (a) and (c) are present on a second nucleic acid molecule, e.g., a second vector, e.g., a second vector, e.g., a second AAV vector. The first and second nucleic acid molecule may be AAV vectors.

[1098] In another embodiment, (c) is present on a first nucleic acid molecule, e.g., a first vector, e.g., a first viral vector, e.g., a first AAV vector; and (b) and (a) are present on a second nucleic acid molecule, e.g., a second vector, e.g., a second vector, e.g., a second AAV vector. The first and second nucleic acid molecule may be AAV vectors.

[1099] In another embodiment, each of (a), (b) and (c) are present on different nucleic acid molecules, e.g., different vectors, e.g., different viral vectors, e.g., different AAV vector. For example, (a) may be on a first nucleic acid molecule, (b) on a second nucleic acid molecule, and (c) on a third nucleic acid molecule. The first, second and third nucleic acid molecule may be AAV vectors.

[1100] In another embodiment, when a third and/or fourth gRNA molecule are present, each of (a), (b), (c)(i), (c)(ii) and (c)(iii) may be present on the same nucleic acid molecule, e.g., the same vector, e.g., the same viral vector, e.g., an AAV vector. In an embodiment, the nucleic acid molecule is an AAV vector. In an alternate embodiment, each of (a), (b), (c)(i), (c)(ii) and (c)(iii) may be present on the different nucleic acid molecules, e.g., different vectors, e.g., the different viral vectors, e.g., different AAV vectors. In further embodiments, each of (a), (b), (c)(i), (c)(ii) and (c)(iii) may be present on more than one nucleic acid molecule, but fewer than five nucleic acid molecules, e.g., AAV vectors.

[1101] In another embodiment, when (d) a template nucleic acid is present, each of (a), (b), and (d) may be present on the same nucleic acid molecule, e.g., the same vector, e.g., the same viral vector, e.g., an AAV vector. In an embodiment, the nucleic acid molecule is an AAV vector. In an alternate embodiment, each of (a), (b), and (d) may be present on the different nucleic acid molecules, e.g., different vectors, e.g., the different viral vectors, e.g., different AAV vectors. In further embodiments, each of (a), (b), and (d) may be present on more than one nucleic acid molecule, but fewer than three nucleic acid molecules, e.g., AAV vectors.

[1102] In another embodiment, when (d) a template nucleic acid is present, each of (a), (b), (c)(i) and (d) may be present on the same nucleic acid molecule, e.g., the same vector, e.g., the same viral vector, e.g., an AAV vector. In an embodiment, the nucleic acid molecule is an AAV vector. In an alternate embodiment, each of (a), (b), (c)(i) and (d) may be present on the different nucleic acid molecules, e.g., different vectors, e.g., the different viral vectors, e.g., different AAV vectors. In further embodiments, each of (a), (b), (c)(i) and (d) may be present on more than one nucleic acid molecule, but fewer than four nucleic acid molecules, e.g., AAV vectors.

[1103] In another embodiment, when (d) a template nucleic acid is present, each of (a), (b), (c)(i), (c)(ii) and (d) may be present on the same nucleic acid molecule, e.g., the same vector, e.g., the same viral vector, e.g., an AAV vector. In an embodiment, the nucleic acid molecule is an AAV vector. In an alternate embodiment, each of (a), (b), (c)(i), (c)(ii) and (d) may be present on the different nucleic acid molecules, e.g., different vectors, e.g., the different viral vectors, e.g., different AAV vectors. In further embodiments, each of (a), (b), (c)(i), (c)(ii) and (d) may be present on more than one nucleic acid molecule, but fewer than five nucleic acid molecules, e.g., AAV vectors.

[1104] In another embodiment, when (d) a template nucleic acid is present, each of (a), (b), (c)(i), (c)(ii), (c)(iii) and (d) may be present on the same nucleic acid molecule, e.g., the same vector, e.g., the same viral vector, e.g., an AAV vector. In an embodiment, the nucleic acid molecule is an AAV vector. In an alternate embodiment, each of (a), (b), (c)(i), (c)(ii), (c)(iii) and (d) may be present on the different nucleic acid molecules, e.g., different vectors, e.g., the different viral vectors, e.g., different AAV vectors. In further embodiments, each of (a), (b), (c)(i), (c)(ii), (c)(iii) and (d) may be present on more than one nucleic acid molecule, but fewer than six nucleic acid molecules, e.g., AAV vectors.

[1105] The nucleic acids described herein may comprise a promoter operably linked to the sequence that encodes the gRNA molecule of (a), e.g., a promoter described herein. The nucleic acid may further comprise a second promoter operably linked to the sequence that encodes the second, third and/or fourth gRNA molecule of (c), e.g., a promoter described herein. The promoter and second promoter differ from one another. In an embodiment, the promoter and second promoter are the same.

[1106] The nucleic acids described herein may further comprise a promoter operably linked to the sequence that encodes the Cas9 molecule of (b), e.g., a promoter described herein.

[1107] In certain embodiments, the delivery vehicle is a non-viral vector, and in certain of these embodiments the non-viral vector is an inorganic nanoparticle. Exemplary inorganic nanoparticles include, e.g., magnetic nanoparticles (e.g., Fe₃MnO₂) or silica. The outer surface of the nanoparticle can be conjugated with a positively charged polymer (e.g., polyethylenimine, polylysine, polyserine) which allows for attachment (e.g., conjugation or entrapment) of payload. In an embodiment, the non-viral vector is an organic nanoparticle (e.g., entrapment of the payload inside the nanoparticle). Exemplary organic nanoparticles include, e.g., SNALP liposomes that contain cationic lipids together with neutral helper lipids which are coated with polyethylene glycol (PEG) and protamine and nucleic acid complex coated with lipid coating.

[1108] Exemplary lipids for gene transfer are shown below in Table 8.

TABLE 8
Lipids Used for Gene Transfer

| Lipid | Abbreviation | Feature |
|---|---|---|
| 1,2-Dioleoyl-sn-glycero-3-phosphatidylcholine | DOPC | Helper |
| 1,2-Dioleoyl-sn-glycero-3-phosphatidylethanolamine | DOPE | Helper |
| Cholesterol | | Helper |
| N-[1-(2,3-Dioleyloxy)propyl]N,N,N-trimethylammonium | DOTMA | Cationic |
| chloride | | |
| 1,2-Dioleoyloxy-3-trimethylammonium-propane | DOTAP | Cationic |
| Dioctadecylamidoglycylspermine | DOGS | Cationic |
| N-(3-Aminopropyl)-N,N-dimethyl-2,3-bis(dodecyloxy)-1- | GAP-DLRIE | Cationic |
| propanaminium bromide | | |
| Cetyltrimethylammonium bromide | CTAB | Cationic |
| 6-Lauroxyhexyl ornithinate | LHON | Cationic |
| 1-(2,3-Dioleoyloxypropyl)-2,4,6-trimethylpyridinium | 2Oc | Cationic |
| 2,3-Dioleyloxy-N-[2(sperminecarboxamido-ethyl]-N,N-dimethyl- | DOSPA | Cationic |
| 1-propanaminium trifluoroacetate | | |
| 1,2-Dioleyl-3-trimethylammonium-propane | DOPA | Cationic |
| N-(2-Hydroxyethyl)-N,N-dimethyl-2,3-bis(tetradecyloxy)-1- | MDRIE | Cationic |
| propanaminium bromide | | |
| Dimyristooxypropyl dimethyl hydroxyethyl ammonium bromide | DMRI | Cationic |
| 3β-[N-(N′,N′-Dimethylaminoethane)-carbamoyl]cholesterol | DC-Chol | Cationic |
| Bis-guanidium-tren-cholesterol | BGTC | Cationic |
| 1,3-Diodeoxy-2-(6-carboxy-spermyl)-propylamide | DOSPER | Cationic |
| Dimethyloctadecylammonium bromide | DDAB | Cationic |
| Dioctadecylamidoglicylspermidin | DSL | Cationic |
| rac-[2,3-Dioctadecyloxypropyl)(2-hydroxyethyl)]- | CLIP-1 | Cationic |
| dimethylammonium chloride | | |
| rac-[2(2,3-Dihexadecyloxypropyl- | CLIP-6 | Cationic |
| oxymethyloxy)ethyl]trimethylammonium bromide | | |
| Ethyldimyristoylphosphatidylcholine | EDMPC | Cationic |
| 1,2-Distearyloxy-N,N-dimethy1-3-aminopropane | DSDMA | Cationic |
| 1,2-Dimyristoyl-trimethylammonium propane | DMTAP | Cationic |
| O,O′-Dimyristyl-N-lysyl aspartate | DMKE | Cationic |
| 1,2-Distearoyl-sn-glycero-3-ethylphosphocholine | DSEPC | Cationic |
| N-Palmitoyl D-erythro-sphingosyl carbamoyl-spermine | CCS | Cationic |
| N-t-Butyl-N0-tetradecyl-3-tetradecylaminopropionamidine | diC14-amidine | Cationic |
| Octadecenolyoxy[ethyl-2-heptadecenyl-3 hydroxyethyl] | DOTIM | Cationic |
| imidazolinium chloride | | |
| N1-Cholesteryloxycarbonyl-3,7-diazanonane-1,9-diamine | CDAN | Cationic |
| 2-(3-[Bis(3-amino-propyl)-amino]propylamino)-N- | RPR209120 | Cationic |
| ditetradecylcarbamoylme-ethyl-acetamide | | |
| 1,2-dilinoleyloxy-3-dimethylaminopropane | DLinDMA | Cationic |
| 2,2-dilinoleyl-4-dimethylaminoethyl-[1,3]-dioxolane | DLin-KC2- | Cationic |
| | DMA | |
| dilinoleyl-methyl-4-dimethylaminobutyrate | DLin-MC3- | Cationic |
| | DMA | |

[1109] Exemplary polymers for gene transfer are shown below in Table 9.

TABLE 9
Polymers Used for Gene Transfer

| Polymer | Abbreviation |
|---|---|
| Poly(ethylene)glycol | PEG |
| Polyethylenimine | PEI |
| Dithiobis(succinimidylpropionate) | DSP |
| Dimethyl-3,3′-dithiobispropionimidate | DTBP |
| Poly(ethylene imine) biscarbamate | PEIC |
| Poly(L-lysine) | PLL |
| Histidine modified PLL | |
| Poly(N-vinylpyrrolidone) | PVP |
| Poly(propylenimine) | PPI |
| Poly(amidoamine) | PAMAM |
| Poly(amido ethylenimine) | SS-PAEI |
| Triethylenetetramine | TETA |
| Poly(β-aminoester) | |
| Poly(4-hydroxy-L-proline ester) | PHP |
| Poly(allylamine) | |
| Poly(α-[4-aminobutyl]-L-glycolic acid) | PAGA |
| Poly(D,L-lactic-co-glycolic acid) | PLGA |
| Poly(N-ethyl-4-vinylpyridinium bromide) | |
| Poly(phosphazene)s | PPZ |
| Poly(phosphoester)s | PPE |
| Poly(phosphoramidate)s | PPA |
| Poly(N-2-hydroxypropylmethacrylamide) | pHPMA |
| Poly (2-(dimethylamino)ethyl methacrylate) | pDMAEMA |
| Poly(2-aminoethyl propylene phosphate) | PPE-EA |
| Chitosan | |
| Galactosylated chitosan | |
| N-Dodacylated chitosan | |
| Histone | |
| Collagen | |
| Dextran-spermine | D-SPM |

[1110] In an embodiment, the vehicle has targeting modifications to increase target cell update of nanoparticles and liposomes, e.g., cell specific antigens, monoclonal antibodies, single chain antibodies, aptamers, polymers, sugars (e.g., N-acetylgalactosamine (GalNAc)), and cell penetrating peptides. In an embodiment, the vehicle uses fusogenic and endosome-destabilizing peptides/polymers. In an embodiment, the vehicle undergoes acid-triggered conformational changes (e.g., to accelerate endosomal escape of the cargo). In an embodiment, a stimuli-cleavable polymer is used, e.g., for release in a cellular compartment. For example, disulfide-based cationic polymers that are cleaved in the reducing cellular environment can be used.

[1111] In an embodiment, the delivery vehicle is a biological non-viral delivery vehicle. In an embodiment, the vehicle is an attenuated bacterium (e.g., naturally or artificially engineered to be invasive but attenuated to prevent pathogenesis and expressing the transgene (e.g., Listeria monocytogenes, certain Salmonella strains, Bifidobacterium longum, and modified Escherichia coli), bacteria having nutritional and tissue-specific tropism to target specific tissues, bacteria having modified surface proteins to alter target tissue specificity). In an embodiment, the vehicle is a genetically modified bacteriophage (e.g., engineered phages having large packaging capacity, less immunogenic, containing mammalian plasmid maintenance sequences and having incorporated targeting ligands). In an embodiment, the vehicle is a mammalian virus-like particle. For example, modified viral particles can be generated (e.g., by purification of the “empty” particles followed by ex vivo assembly of the virus with the desired cargo). The vehicle can also be engineered to incorporate targeting ligands to alter target tissue specificity. In an embodiment, the vehicle is a biological liposome. For example, the biological liposome is a phospholipid-based particle derived from human cells (e.g., erythrocyte ghosts, which are red blood cells broken down into spherical structures derived from the subject (e.g., tissue targeting can be achieved by attachment of various tissue or cell-specific ligands), or secretory exosomes-subject (i.e., patient) derived membrane-bound nanovesicle (30-100 nm) of endocytic origin (e.g., can be produced from various cell types and can therefore be taken up by cells without the need of for targeting ligands).

[1112] In an embodiment, one or more nucleic acid molecules (e.g., DNA molecules) other than the components of a Cas system, e.g., the Cas9 molecule component and/or the gRNA molecule component described herein, are delivered. In an embodiment, the nucleic acid molecule is delivered at the same time as one or more of the components of the Cas system are delivered. In an embodiment, the nucleic acid molecule is delivered before or after (e.g., less than about 30 minutes, 1 hour, 2 hours, 3 hours, 6 hours, 9 hours, 12 hours, 1 day, 2 days, 3 days, 1 week, 2 weeks, or 4 weeks) one or more of the components of the Cas system are delivered. In an embodiment, the nucleic acid molecule is delivered by a different means than one or more of the components of the Cas system, e.g., the Cas9 molecule component and/or the gRNA molecule component, are delivered. The nucleic acid molecule can be delivered by any of the delivery methods described herein. For example, the nucleic acid molecule can be delivered by a viral vector, e.g., an integration-deficient lentivirus, and the Cas9 molecule component and/or the gRNA molecule component can be delivered by electroporation, e.g., such that the toxicity caused by nucleic acids (e.g., DNAs) can be reduced. In an embodiment, the nucleic acid molecule encodes a therapeutic protein, e.g., a protein described herein. In an embodiment, the nucleic acid molecule encodes an RNA molecule, e.g., an RNA molecule described herein.

[1113] Delivery of RNA Encoding a Cas9 Molecule

[1114] RNA encoding Cas9 molecules and/or gRNA molecules, can be delivered into cells, e.g., target cells described herein, by art-known methods or as described herein. For example, Cas9-encoding and/or gRNA-encoding RNA can be delivered, e.g., by microinjection, electroporation, transient cell compression or squeezing (see, e.g., Lee 2012), lipid-mediated transfection, peptide-mediated delivery, or a combination thereof. Cas9-encoding and/or gRNA-encoding RNA can be conjugated to molecules) promoting uptake by the target cells (e.g., target cells described herein).

[1115] In an embodiment, delivery via electroporation comprises mixing the cells with the RNA encoding Cas9 molecules and/or gRNA molecules, with or without donor template nucleic acid molecules, in a cartridge, chamber or cuvette and applying one or more electrical impulses of defined duration and amplitude. In an embodiment, delivery via electroporation is performed using a system in which cells are mixed with the RNA encoding Cas9 molecules and/or gRNA molecules, with or without donor template nucleic acid molecules in a vessel connected to a device (e.g., a pump) which feeds the mixture into a cartridge, chamber or cuvette wherein one or more electrical impulses of defined duration and amplitude are applied, after which the cells are delivered to a second vessel. Cas9-encoding and/or gRNA-encoding RNA can be conjugated to molecules to promote uptake by the target cells (e.g., target cells described herein).

[1116] Delivery of Cas9

[1117] Cas9 molecules can be delivered into cells by art-known methods or as described herein. For example, Cas9 protein molecules can be delivered, e.g., by microinjection, electroporation, transient cell compression or squeezing (see, e.g., Lee 2012), lipid-mediated transfection, peptide-mediated delivery, or a combination thereof. Delivery can be accompanied by DNA encoding a gRNA or by a gRNA. Cas9 protein can be conjugated to molecules promoting uptake by the target cells (e.g., target cells described herein).

[1118] In an embodiment, delivery via electroporation comprises mixing the cells with the Cas9 molecules and/or gRNA molecules, with or without donor nucleic acid, in a cartridge, chamber or cuvette and applying one or more electrical impulses of defined duration and amplitude. In an embodiment, delivery via electroporation is performed using a system in which cells are mixed with the Cas9 molecules and/or gRNA molecules, with or without donor nucleic acid in a vessel connected to a device (e.g., a pump) which feeds the mixture into a cartridge, chamber or cuvette wherein one or more electrical impulses of defined duration and amplitude are applied, after which the cells are delivered to a second vessel. Cas9-encoding and/or gRNA-encoding RNA can be conjugated to molecules to promote uptake by the target cells (e.g., target cells described herein).

[1119] Route of Administration

[1120] Systemic modes of administration include oral and parenteral routes. Parenteral routes include, by way of example, intravenous, intramarrow, intrarterial, intramuscular, intradermal, subcutaneous, intranasal and intraperitoneal routes. Components administered systemically may be modified or formulated to target, e.g., HSCs, hematopoetic stem/progenitor cells, or erythroid progenitors or precursor cells.

[1121] Local modes of administration include, by way of example, intramarrow injection into the trabecular bone or intrafemoral injection into the marrow space, and infusion into the portal vein. In an embodiment, significantly smaller amounts of the components (compared with systemic approaches) may exert an effect when administered locally (for example, directly into the bone marrow) compared to when administered systemically (for example, intravenously). Local modes of administration can reduce or eliminate the incidence of potentially toxic side effects that may occur when therapeutically effective amounts of a component are administered systemically.

[1122] Administration may be provided as a periodic bolus (e.g., intravenously) or as continuous infusion from an internal reservoir or from an external reservoir (for example, from an intravenous bag or implantable pump). Components may be administered locally, for example, by continuous release from a sustained release drug delivery device.

[1123] In addition, components may be formulated to permit release over a prolonged period of time. A release system can include a matrix of a biodegradable material or a material which releases the incorporated components by diffusion. The components can be homogeneously or heterogeneously distributed within the release system. A variety of release systems may be useful, however, the choice of the appropriate system will depend upon rate of release required by a particular application. Both non-degradable and degradable release systems can be used. Suitable release systems include polymers and polymeric matrices, non-polymeric matrices, or inorganic and organic excipients and diluents such as, but not limited to, calcium carbonate and sugar (for example, trehalose). Release systems may be natural or synthetic. However, synthetic release systems are preferred because generally they are more reliable, more reproducible and produce more defined release profiles. The release system material can be selected so that components having different molecular weights are released by diffusion through or degradation of the material.

[1124] Representative synthetic, biodegradable polymers include, for example: polyamides such as poly(amino acids) and poly(peptides); polyesters such as poly(lactic acid), poly(glycolic acid), poly(lactic-co-glycolic acid), and poly(caprolactone); poly(anhydrides); polyorthoesters; polycarbonates; and chemical derivatives thereof (substitutions, additions of chemical groups, for example, alkyl, alkylene, hydroxylations, oxidations, and other modifications routinely made by those skilled in the art), copolymers and mixtures thereof. Representative synthetic, non-degradable polymers include, for example: polyethers such as poly(ethylene oxide), poly(ethylene glycol), and poly(tetramethylene oxide); vinyl polymers-polyacrylates and polymethacrylates such as methyl, ethyl, other alkyl, hydroxyethyl methacrylate, acrylic and methacrylic acids, and others such as poly(vinyl alcohol), poly(vinyl pyrolidone), and poly(vinyl acetate); poly(urethanes); cellulose and its derivatives such as alkyl, hydroxyalkyl, ethers, esters, nitrocellulose, and various cellulose acetates; polysiloxanes; and any chemical derivatives thereof (substitutions, additions of chemical groups, for example, alkyl, alkylene, hydroxylations, oxidations, and other modifications routinely made by those skilled in the art), copolymers and mixtures thereof.

[1125] Poly(lactide-co-glycolide) microsphere can also be used for injection. Typically the microspheres are composed of a polymer of lactic acid and glycolic acid, which are structured to form hollow spheres. The spheres can be approximately 15-30 microns in diameter and can be loaded with components described herein.

[1126] Bi-Modal or Differential Delivery of Components

[1127] Separate delivery of the components of a Cas system, e.g., the Cas9 molecule component and the gRNA molecule component, and more particularly, delivery of the components by differing modes, can enhance performance, e.g., by improving tissue specificity and safety.

[1128] In an embodiment, the Cas9 molecule and the gRNA molecule are delivered by different modes, or as sometimes referred to herein as differential modes. Different or differential modes, as used herein, refer modes of delivery that confer different pharmacodynamic or pharmacokinetic properties on the subject component molecule, e.g., a Cas9 molecule, gRNA molecule, template nucleic acid, or payload. For example, the modes of delivery can result in different tissue distribution, different half-life, or different temporal distribution, e.g., in a selected compartment, tissue, or organ.

[1129] Some modes of delivery, e.g., delivery by a nucleic acid vector that persists in a cell, or in progeny of a cell, e.g., by autonomous replication or insertion into cellular nucleic acid, result in more persistent expression of and presence of a component. Examples include viral, e.g., AAV or lentivirus, delivery.

[1130] By way of example, the components, e.g., a Cas9 molecule and a gRNA molecule, can be delivered by modes that differ in terms of resulting half-life or persistent of the delivered component the body, or in a particular compartment, tissue or organ. In an embodiment, a gRNA molecule can be delivered by such modes. The Cas9 molecule component can be delivered by a mode which results in less persistence or less exposure to the body or a particular compartment or tissue or organ.

[1131] More generally, in an embodiment, a first mode of delivery is used to deliver a first component and a second mode of delivery is used to deliver a second component. The first mode of delivery confers a first pharmacodynamic or pharmacokinetic property. The first pharmacodynamic property can be, e.g., distribution, persistence, or exposure, of the component, or of a nucleic acid that encodes the component, in the body, a compartment, tissue or organ. The second mode of delivery confers a second pharmacodynamic or pharmacokinetic property. The second pharmacodynamic property can be, e.g., distribution, persistence, or exposure, of the component, or of a nucleic acid that encodes the component, in the body, a compartment, tissue or organ.

[1132] In certain embodiments, the first pharmacodynamic or pharmacokinetic property, e.g., distribution, persistence or exposure, is more limited than the second pharmacodynamic or pharmacokinetic property.

[1133] In certain embodiments, the first mode of delivery is selected to optimize, e.g., minimize, a pharmacodynamic or pharmacokinetic property, e.g., distribution, persistence or exposure.

[1134] In certain embodiments, the second mode of delivery is selected to optimize, e.g., maximize, a pharmacodynamic or pharmacokinetic property, e.g., distribution, persistence or exposure.

[1135] In an embodiments, the first mode of delivery comprises the use of a relatively persistent element, e.g., a nucleic acid, e.g., a plasmid or viral vector, e.g., an AAV or lentivirus. As such vectors are relatively persistent product transcribed from them would be relatively persistent.

[1136] In certain embodiments, the second mode of delivery comprises a relatively transient element, e.g., an RNA or protein.

[1137] In certain embodiments, the first component comprises gRNA molecule, and the delivery mode is relatively persistent, e.g., the gRNA is transcribed from a plasmid or viral vector, e.g., an AAV or lentivirus. Transcription of these genes would be of little physiological consequence because the genes do not encode for a protein product, and the gRNAs are incapable of acting in isolation. The second component, a Cas9 molecule, is delivered in a transient manner, for example as mRNA or as protein, ensuring that the full Cas9 molecule/gRNA molecule complex is only present and active for a short period of time.

[1138] Furthermore, the components can be delivered in different molecular form or with different delivery vectors that complement one another to enhance safety and tissue specificity.

[1139] Use of differential delivery modes can enhance performance, safety and/or efficacy, e.g., the likelihood of an eventual off-target modification can be reduced. Delivery of immunogenic components, e.g., Cas9 molecules, by less persistent modes can reduce immunogenicity, as peptides from the bacterially-derived Cas enzyme are displayed on the surface of the cell by MHC molecules. A two-part delivery system can alleviate these drawbacks.

[1140] Differential delivery modes can be used to deliver components to different, but overlapping target regions. The formation active complex is minimized outside the overlap of the target regions. Thus, in an embodiment, a first component, e.g., a gRNA molecule is delivered by a first delivery mode that results in a first spatial, e.g., tissue, distribution. A second component, e.g., a Cas9 molecule is delivered by a second delivery mode that results in a second spatial, e.g., tissue, distribution. In an embodiment, the first mode comprises a first element selected from a liposome, nanoparticle, e.g., polymeric nanoparticle, and a nucleic acid, e.g., viral vector. The second mode comprises a second element selected from the group. In an embodiment, the first mode of delivery comprises a first targeting element, e.g., a cell specific receptor or an antibody, and the second mode of delivery does not include that element. In certain embodiments, the second mode of delivery comprises a second targeting element, e.g., a second cell specific receptor or second antibody.

[1141] When the Cas9 molecule is delivered in a virus delivery vector, a liposome, or polymeric nanoparticle, there is the potential for delivery to and therapeutic activity in multiple tissues, when it may be desirable to only target a single tissue. A two-part delivery system can resolve this challenge and enhance tissue specificity. If the gRNA molecule and the Cas9 molecule are packaged in separated delivery vehicles with distinct but overlapping tissue tropism, the fully functional complex is only be formed in the tissue that is targeted by both vectors.

[1142] Disclosed herein are methods of altering a cell, e.g., altering the structure, e.g., altering the sequence, of a target nucleic acid of a cell, comprising contacting said cell with: (a) a gRNA molecule that targets the HBB gene, e.g., a gRNA molecule as described herein; (b) a Cas9 molecule, e.g., a Cas9 molecule as described herein; and optionally, (c) a second, third and/or fourth gRNA that targets HBB gene, e.g., a gRNA molecule; and optionally, (d) a template nucleic acid, as described herein. In an embodiment, the method comprises contacting said cell with (a) and (b). In an embodiment, the method comprises contacting said cell with (a), (b), and (c). In an embodiment, the method comprises contacting said cell with (a), (b), (c) and (d). In an embodiment, the gRNA targets the HBB gene and no exogenous template nucleic acid is contacted with the cell. The targeting domain of the gRNA molecule of (a) and optionally (c) may be selected from a targeting domain sequence described herein, e.g., a targeting domain sequence selected from any of Tables 1-3, or a targeting domain sequence that differs by no more than 1, 2, 3, 4, or 5 nucleotides from, a targeting domain sequence described herein, e.g., a targeting domain sequence from any of Tables 1-3.

[1143] In an embodiment, the method comprises contacting a cell from a subject suffering from or likely to develop SCD. The cell may be from a subject having a mutation at an SCD target position in the HBB gene. In an embodiment, the cell being contacted in the disclosed method is an erythroid cell. The contacting may be performed ex vivo and the contacted cell may be returned to the subject's body after the contacting step. In another embodiment, the contacting step may be performed in vivo. In an embodiment, the method of altering a cell as described herein comprises acquiring knowledge of the sequence at an SCD target position in said cell, prior to the contacting step. Acquiring knowledge of the sequence at an SCD target position in the cell may be by sequencing the HBB gene, or a portion of the HBB gene. In an embodiment, the contacting step of the method comprises contacting the cell with a nucleic acid, e.g., a vector, e.g., an AAV vector, that expresses at least one of (a), (b), and (c). In an embodiment, the contacting step of the method comprises contacting the cell with a nucleic acid, e.g., a vector, e.g., an AAV vector, that expresses each of (a), (b), and (c). In another embodiment, the contacting step of the method comprises delivering to the cell a Cas9 molecule of (b) and a nucleic acid which encodes a gRNA molecule (a) and optionally, a second gRNA molecule (c)(i) (and further optionally, a third gRNA molecule (c)(iv) and/or fourth gRNA molecule (c)(iii).

[1144] In an embodiment, the contacting step of the method comprises contacting the cell with a nucleic acid, e.g., a vector, e.g., an AAV vector, that expresses at least one of (a), (b), (c) and (d). In an embodiment, the contacting step of the method comprises contacting the cell with a nucleic acid, e.g., a vector, e.g., an AAV vector, that expresses each of (a), (b), and (c). In another embodiment, the contacting step of the method comprises delivering to the cell a Cas9 molecule of (b), a nucleic acid which encodes a gRNA molecule of (a) and a template nucleic acid of (d), and optionally, a second gRNA molecule (c)(i) (and further optionally, a third gRNA molecule (c)(iv) and/or fourth gRNA molecule (c)(iii).

[1145] In an embodiment, contacting comprises contacting the cell with a nucleic acid, e.g., a vector, e.g., an AAV vector, e.g., an AAV2 vector, a modified AAV2 vector, an AAV3 vector, a modified AAV3 vector, an AAV6 vector, a modified AAV6 vector, an AAV8 vector or an AAV9 vector.

[1146] In an embodiment, contacting comprises delivering to the cell a Cas9 molecule of (b), as a protein or an mRNA, and a nucleic acid which encodes (a) and optionally a second, third and/or fourth gRNA molecule of (c).

[1147] In an embodiment, contacting comprises delivering to the cell a Cas9 molecule of (b), as a protein or an mRNA, said gRNA molecule of (a), as an RNA, and optionally said second, third and/or fourth gRNA molecule of (c), as an RNA.

[1148] In an embodiment, contacting comprises delivering to the cell a gRNA of (a) as an RNA, optionally said second, third and/or fourth gRNA molecule of (c) as an RNA, and a nucleic acid that encodes the Cas9 molecule of (b).

[1149] Disclosed herein are also methods of treating or preventing a subject suffering from or likely to develop SCD, e.g., altering the structure, e.g., sequence, of a target nucleic acid of the subject, comprising contacting the subject (or a cell from the subject) with:

[1150] (a) a gRNA that targets the HBB gene, e.g., a gRNA disclosed herein;

[1151] (b) a Cas9 molecule, e.g., a Cas9 molecule disclosed herein; and

[1152] optionally, (c)(i) a second gRNA that targets the HBB gene, e.g., a second gRNA disclosed herein, and further optionally, (c)(ii) a third gRNA molecule, and still further optionally, (c)(iii) a fourth gRNA molecule that targets the HBB gene, e.g., a third and fourth gRNA disclosed herein. The method of treating a subject may further comprise contacting the subject (or a cell from the subject) with (d) a template nucleic acid (in an embodiment where an exogenous template is used), e.g., a template nucleic acid disclosed herein. In an embodiment, a template nucleic acid is used when the method of treating a subject uses HDR to alter the sequence of the target nucleic acid of the subject. In an embodiment, the gRNA molecule targets the HBB gene and no exogenous template nucleic acid is contacted with the subject (or a cell from the subject). In an embodiment, contacting comprises contacting with (a) and (b). In an embodiment, contacting comprises contacting with (a), (b), and (c)(i). In an embodiment, contacting comprises contacting with (a), (b), (c)(i) and (c)(ii). In an embodiment, contacting comprises contacting with (a), (b), (c)(i), (c)(ii) and (c)(iii). In an embodiment, contacting comprises contacting with (a), (b), (c)(i) and (d). In an embodiment, contacting comprises contacting with (a), (b), (c)(i), (c)(ii) and (d). In an embodiment, contacting comprises contacting with (a), (b), (c)(i), (c)(ii), (c)(iii) and (d).

[1153] The targeting domain of the gRNA molecule of (a) or (c) (e.g., (c)(i), (c)(ii), or (c)(iii)) may be selected from a targeting domain sequence described herein, e.g., a targeting domain sequence selected from any of Tables 1-3, or a targeting domain sequence that differs by no more than 1, 2, 3, 4, or 5 nucleotides from a targeting domain sequence described herein, e.g., a targeting domain sequence from any of Tables 1-3.

[1154] In an embodiment, the method comprises acquiring knowledge of the sequence (e.g., a mutation) of an SCD target position in said subject. In an embodiment, the method comprises acquiring knowledge of the sequence (e.g., a mutation) of an SCD target position in said subject by sequencing the HBB gene or a portion of the HBB gene. In an embodiment, the method comprises correcting a mutation at an SCD target position in the HBB gene. In an embodiment, the method comprises correcting a mutation at an SCD target position in the HBB gene by HDR.

[1155] When the method comprises correcting the mutation at an SCD target position by HDR, a Cas9 of (b), at least one gRNA molecule, e.g., a gRNA molecule of (a) and a template nucleic acid of (d) are included in the contacting step. In an embodiment, a cell of the subject is contacted ex vivo with (a), (b), (d) and optionally (c)(i), further optionally (c)(ii), and still further optionally (c)(iii). In another embodiment, said cell is returned to the subject's body. In an embodiment, a cell of the subject is contacted is in vivo with (a), (b), (d) and optionally (c)(i), further optionally (c)(ii), and still further optionally (c)(iii). In an embodiment, the cell of the subject is contacted in vivo by intravenous delivery of (a), (b), (d) and optionally (c)(i), further optionally (c)(ii), and still further optionally (c)(iii). In an embodiment, the cell of the subject is contacted in vivo by intramuscular delivery of (a), (b), (d) and optionally (c)(i), further optionally (c)(ii), and still further optionally (c)(iii). In an embodiment, the cell of the subject is contacted in vivo by subcutaneous delivery of (a), (b), (d) and optionally (c)(i), further optionally (c)(ii), and still further optionally (c)(iii). In an embodiment, the cell of the subject is contacted in vivo by intra-bone marrow (IBM) delivery of (a), (b), (d) and optionally (c)(i), further optionally (c)(ii), and still further optionally (c)(iii).

[1156] In an embodiment, contacting comprises contacting the subject with a nucleic acid, e.g., a vector, e.g., an AAV vector, described herein, e.g., a nucleic acid that encodes at least one of (a), (b), (d) and optionally (c)(i), further optionally (c)(ii), and still further optionally (c)(iii).

[1157] In an embodiment, contacting comprises delivering to said subject said Cas9 molecule of (b), as a protein or mRNA, and a nucleic acid which encodes (a), a nucleic acid of (d) and optionally (c)(i), further optionally (c)(ii), and still further optionally (c)(iii).

[1158] In an embodiment, contacting comprises delivering to the subject the Cas9 molecule of (b), as a protein or mRNA, the gRNA molecule of (a), as an RNA, a nucleic acid of (d) and optionally the second, third and/or fourth gRNA molecule of (c), as an RNA.

[1159] In an embodiment, contacting comprises delivering to the subject the gRNA molecule of (a), as an RNA, optionally said second, third and/or fourth gRNA molecule of (c), as an RNA, a nucleic acid that encodes the Cas9 molecule of (b), and a nucleic acid of (d).

[1160] In an embodiment, a cell of the subject is contacted ex vivo with (a), (b) and optionally (c)(i), further optionally (c)(ii), and still further optionally (c)(iii). In an embodiment, said cell is returned to the subject's body.

[1161] In an embodiment, a populations of cells from a subject is contacted ex vivo with (a), (b) and optionally (c) to correct the E6V mutation in the HBB gene and a second population of cells from the subject is contacted ex vivo with (a), (b) and optionally (c) to introduce a mutation in a second gene, e.g., the BCL11A gene, or to knockout or knock down a second gene, e.g., the BCL11A gene. A mixture of the two cell populations may be returned to the subject's body to treat or prevent SCD.

[1162] In an embodiment, a cell of the subject is contacted is in vivo with (a), (b) and optionally (c)(i), further optionally (c)(ii), and still further optionally (c)(iii). In an embodiment, the cell of the subject is contacted in vivo by intravenous delivery of (a), (b) and optionally (c)(i), further optionally (c)(ii), and still further optionally (c)(iii). In an embodiment, the cell of the subject is contacted in vivo by intramuscular delivery of (a), (b) and optionally (c)(i), further optionally (c)(ii), and still further optionally (c)(iii). In an embodiment, the cell of the subject is contacted in vivo by subcutaneous delivery of (a), (b) and optionally (c)(i), further optionally (c)(ii), and still further optionally (c)(iii). In an embodiment, the cell of the subject is contacted in vivo by intra-bone marrow (IBM) delivery of (a), (b) and optionally (c)(i), further optionally (c)(ii), and still further optionally (c)(iii).

[1163] In an embodiment, contacting comprises contacting the subject with a nucleic acid, e.g., a vector, e.g., an AAV vector, described herein, e.g., a nucleic acid that encodes at least one of (a), (b), and optionally (c)(i), further optionally (c)(ii), and still further optionally (c)(iii).

[1164] In an embodiment, contacting comprises delivering to said subject said Cas9 molecule of (b), as a protein or mRNA, and a nucleic acid which encodes (a) and optionally (c)(i), further optionally (c)(ii), and still further optionally (c)(iii).

[1165] In an embodiment, contacting comprises delivering to the subject the Cas9 molecule of (b), as a protein or mRNA, the gRNA molecule of (a), as an RNA, and optionally the second, third and/or fourth gRNA molecule of (c), as an RNA.

[1166] In an embodiment, contacting comprises delivering to the subject the gRNA molecule of (a), as an RNA, optionally said second, third and/or fourth gRNA molecule of (c), as an RNA, and a nucleic acid that encodes the Cas9 molecule of (b).

[1167] In one embodiment, disclosed herein are kits comprising compositions of the invention and instructions for use.

### Ex Vivo Delivery

[1168] In some embodiments, components described in Table 6 are introduced into cells which are then introduced into the subject. Methods of introducing the components can include, e.g., any of the delivery methods described in Table 7.

### VIII. Modified Nucleosides, Nucleotides, and Nucleic Acids

[1169] Modified nucleosides and modified nucleotides can be present in nucleic acids, e.g., particularly gRNA molecule, but also other forms of RNA, e.g., mRNA, RNAi, or siRNA. As described herein, “nucleoside” is defined as a compound containing a five-carbon sugar molecule (a pentose or ribose) or derivative thereof, and an organic base, purine or pyrimidine, or a derivative thereof. As described herein, “nucleotide” is defined as a nucleoside further comprising a phosphate group.

[1170] Modified nucleosides and nucleotides can include one or more of:

[1171] (i) alteration, e.g., replacement, of one or both of the non-linking phosphate oxygens and/or of one or more of the linking phosphate oxygens in the phosphodiester backbone linkage;

[1172] (ii) alteration, e.g., replacement, of a constituent of the ribose sugar, e.g., of the 2′ hydroxyl on the ribose sugar;

[1173] (iii) wholesale replacement of the phosphate moiety with “dephospho” linkers;

[1174] (iv) modification or replacement of a naturally occurring nucleobase;

[1175] (v) replacement or modification of the ribose-phosphate backbone;

[1176] (vi) modification of the 3′ end or 5′ end of the oligonucleotide, e.g., removal, modification or replacement of a terminal phosphate group or conjugation of a moiety; and

[1177] (vii) modification of the sugar.

[1178] The modifications listed above can be combined to provide modified nucleosides and nucleotides that can have two, three, four, or more modifications. For example, a modified nucleoside or nucleotide can have a modified sugar and a modified nucleobase. In an embodiment, every base of a gRNA is modified, e.g., all bases have a modified phosphate group, e.g., all are phosphorothioate groups. In an embodiment, all, or substantially all, of the phosphate groups of a unimolecular (or chimeric) or modular gRNA molecule are replaced with phosphorothioate groups.

[1179] In an embodiment, modified nucleotides, e.g., nucleotides having modifications as described herein, can be incorporated into a nucleic acid, e.g., a “modified nucleic acid.” In an embodiment, the modified nucleic acids comprise one, two, three or more modified nucleotides. In an embodiment, at least 5% (e.g., at least about 5%, at least about 10%, at least about 15%, at least about 20%, at least about 25%, at least about 30%, at least about 35%, at least about 40%, at least about 45%, at least about 50%, at least about 55%, at least about 60%, at least about 65%, at least about 70%, at least about 75%, at least about 80%, at least about 85%, at least about 90%, at least about 95%, or about 100%) of the positions in a modified nucleic acid are a modified nucleotides.

[1180] Unmodified nucleic acids can be prone to degradation by, e.g., cellular nucleases. For example, nucleases can hydrolyze nucleic acid phosphodiester bonds. Accordingly, in one aspect the modified nucleic acids described herein can contain one or more modified nucleosides or nucleotides, e.g., to introduce stability toward nucleases.

[1181] In an embodiment, the modified nucleosides, modified nucleotides, and modified nucleic acids described herein can exhibit a reduced innate immune response when introduced into a population of cells, both in vivo and ex vivo. The term “innate immune response” includes a cellular response to exogenous nucleic acids, including single stranded nucleic acids, generally of viral or bacterial origin, which involves the induction of cytokine expression and release, particularly the interferons, and cell death. In an embodiment, the modified nucleosides, modified nucleotides, and modified nucleic acids described herein can disrupt binding of a major groove interacting partner with the nucleic acid. In an embodiment, the modified nucleosides, modified nucleotides, and modified nucleic acids described herein can exhibit a reduced innate immune response when introduced into a population of cells, both in vivo and ex vivo, and also disrupt binding of a major groove interacting partner with the nucleic acid.

[1182] Definitions of Chemical Groups

[1183] As used herein, “alkyl” is meant to refer to a saturated hydrocarbon group which is straight-chained or branched. Example alkyl groups include methyl (Me), ethyl (Et), propyl (e.g., n-propyl and isopropyl), butyl (e.g., n-butyl, isobutyl, t-butyl), pentyl (e.g., n-pentyl, isopentyl, neopentyl), and the like. An alkyl group can contain from 1 to about 20, from 2 to about 20, from 1 to about 12, from 1 to about 8, from 1 to about 6, from 1 to about 4, or from 1 to about 3 carbon atoms.

[1184] As used herein, “aryl” refers to monocyclic or polycyclic (e.g., having 2, 3 or 4 fused rings) aromatic hydrocarbons such as, for example, phenyl, naphthyl, anthracenyl, phenanthrenyl, indanyl, indenyl, and the like. In an embodiment, aryl groups have from 6 to about 20 carbon atoms.

[1185] As used herein, “alkenyl” refers to an aliphatic group containing at least one double bond.

[1186] As used herein, “alkynyl” refers to a straight or branched hydrocarbon chain containing 2-12 carbon atoms and characterized in having one or more triple bonds. Examples of alkynyl groups include, but are not limited to, ethynyl, propargyl, and 3-hexynyl.

[1187] As used herein, “arylalkyl” or “aralkyl” refers to an alkyl moiety in which an alkyl hydrogen atom is replaced by an aryl group. Aralkyl includes groups in which more than one hydrogen atom has been replaced by an aryl group. Examples of “arylalkyl” or “aralkyl” include benzyl, 2-phenylethyl, 3-phenylpropyl, 9-fluorenyl, benzhydryl, and trityl groups.

[1188] As used herein, “cycloalkyl” refers to a cyclic, bicyclic, tricyclic, or polycyclic non-aromatic hydrocarbon groups having 3 to 12 carbons. Examples of cycloalkyl moieties include, but are not limited to, cyclopropyl, cyclopentyl, and cyclohexyl.

[1189] As used herein, “heterocyclyl” refers to a monovalent radical of a heterocyclic ring system. Representative heterocyclyls include, without limitation, tetrahydrofuranyl, tetrahydrothienyl, pyrrolidinyl, pyrrolidonyl, piperidinyl, pyrrolinyl, piperazinyl, dioxanyl, dioxolanyl, diazepinyl, oxazepinyl, thiazepinyl, and morpholinyl.

[1190] As used herein, “heteroaryl” refers to a monovalent radical of a heteroaromatic ring system. Examples of heteroaryl moieties include, but are not limited to, imidazolyl, oxazolyl, thiazolyl, triazolyl, pyrrolyl, furanyl, indolyl, thiophenyl pyrazolyl, pyridinyl, pyrazinyl, pyridazinyl, pyrimidinyl, indolizinyl, purinyl, naphthyridinyl, quinolyl, and pteridinyl.

[1191] Phosphate Backbone Modifications

[1192] Phosphate Group

[1193] In an embodiment, the phosphate group of a modified nucleotide can be modified by replacing one or more of the oxygens with a different substituent. Further, the modified nucleotide, e.g., modified nucleotide present in a modified nucleic acid, can include the wholesale replacement of an unmodified phosphate moiety with a modified phosphate as described herein. In an embodiment, the modification of the phosphate backbone can include alterations that result in either an uncharged linker or a charged linker with unsymmetrical charge distribution.

[1194] Examples of modified phosphate groups include, phosphorothioate, phosphoroselenates, borano phosphates, borano phosphate esters, hydrogen phosphonates, phosphoroamidates, alkyl or aryl phosphonates and phosphotriesters. In an embodiment, one of the non-bridging phosphate oxygen atoms in the phosphate backbone moiety can be replaced by any of the following groups: sulfur (S), selenium (Se), BR₃ (wherein R can be, e.g., hydrogen, alkyl, or aryl), C (e.g., an alkyl group, an aryl group, and the like), H, NR₂ (wherein R can be, e.g., hydrogen, alkyl, or aryl), or OR (wherein R can be, e.g., alkyl or aryl). The phosphorous atom in an unmodified phosphate group is achiral. However, replacement of one of the non-bridging oxygens with one of the above atoms or groups of atoms can render the phosphorous atom chiral; that is to say that a phosphorous atom in a phosphate group modified in this way is a stereogenic center. The stereogenic phosphorous atom can possess either the “R” configuration (herein Rp) or the “S” configuration (herein Sp).

[1195] Phosphorodithioates have both non-bridging oxygens replaced by sulfur. The phosphorus center in the phosphorodithioates is achiral which precludes the formation of oligoribonucleotide diastereomers. In an embodiment, modifications to one or both non-bridging oxygens can also include the replacement of the non-bridging oxygens with a group independently selected from S, Se, B, C, H, N, and OR (R can be, e.g., alkyl or aryl).

[1196] The phosphate linker can also be modified by replacement of a bridging oxygen, (i.e., the oxygen that links the phosphate to the nucleoside), with nitrogen (bridged phosphoroamidates), sulfur (bridged phosphorothioates) and carbon (bridged methylenephosphonates). The replacement can occur at either linking oxygen or at both of the linking oxygens.

[1197] Replacement of the Phosphate Group

[1198] The phosphate group can be replaced by non-phosphorus containing connectors. In an embodiment, the charge phosphate group can be replaced by a neutral moiety.

[1199] Examples of moieties which can replace the phosphate group can include, without limitation, e.g., methyl phosphonate, hydroxylamino, siloxane, carbonate, carboxymethyl, carbamate, amide, thioether, ethylene oxide linker, sulfonate, sulfonamide, thioformacetal, formacetal, oxime, methyleneimino, methylenemethylimino, methylenehydrazo, methylenedimethylhydrazo and methyleneoxymethylimino.

[1200] Replacement of the Ribophosphate Backbone

[1201] Scaffolds that can mimic nucleic acids can also be constructed wherein the phosphate linker and ribose sugar are replaced by nuclease resistant nucleoside or nucleotide surrogates. In an embodiment, the nucleobases can be tethered by a surrogate backbone. Examples can include, without limitation, the morpholino, cyclobutyl, pyrrolidine and peptide nucleic acid (PNA) nucleoside surrogates.

[1202] Sugar Modifications

[1203] The modified nucleosides and modified nucleotides can include one or more modifications to the sugar group. For example, the 2′ hydroxyl group (OH) can be modified or replaced with a number of different “oxy” or “deoxy” substituents. In an embodiment, modifications to the 2′ hydroxyl group can enhance the stability of the nucleic acid since the hydroxyl can no longer be deprotonated to form a 2′-alkoxide ion. The 2′-alkoxide can catalyze degradation by intramolecular nucleophilic attack on the linker phosphorus atom.

[1204] Examples of “oxy”-2′ hydroxyl group modifications can include alkoxy or aryloxy (OR, wherein “R” can be, e.g., alkyl, cycloalkyl, aryl, aralkyl, heteroaryl or a sugar); polyethyleneglycols (PEG), O(CH₂CH₂O)ₙCH₂CH₂OR wherein R can be, e.g., H or optionally substituted alkyl, and n can be an integer from 0 to 20 (e.g., from 0 to 4, from 0 to 8, from 0 to 10, from 0 to 16, from 1 to 4, from 1 to 8, from 1 to 10, from 1 to 16, from 1 to 20, from 2 to 4, from 2 to 8, from 2 to 10, from 2 to 16, from 2 to 20, from 4 to 8, from 4 to 10, from 4 to 16, and from 4 to 20). In an embodiment, the “oxy”-2′ hydroxyl group modification can include “locked” nucleic acids (LNA) in which the 2′ hydroxyl can be connected, e.g., by a C₁₋₆ alkylene or C₁₋₆ heteroalkylene bridge, to the 4′ carbon of the same ribose sugar, where exemplary bridges can include methylene, propylene, ether, or amino bridges; O-amino (wherein amino can be, e.g., NH₂; alkylamino, dialkylamino, heterocyclyl, arylamino, diarylamino, heteroarylamino, or diheteroarylamino, ethylenediamine, or polyamino) and aminoalkoxy, O(CH₂)ₙ-amino, (wherein amino can be, e.g., NH₂; alkylamino, dialkylamino, heterocyclyl, arylamino, diarylamino, heteroarylamino, or diheteroarylamino, ethylenediamine, or polyamino). In an embodiment, the “oxy”-2′ hydroxyl group modification can include the methoxyethyl group (MOE), (OCH₂CH₂OCH₃, e.g., a PEG derivative).

[1205] “Deoxy” modifications can include hydrogen (i.e. deoxyribose sugars, e.g., at the overhang portions of partially ds RNA); halo (e.g., bromo, chloro, fluoro, or iodo); amino (wherein amino can be, e.g., NH₂; alkylamino, dialkylamino, heterocyclyl, arylamino, diarylamino, heteroarylamino, diheteroarylamino, or amino acid); NH(CH₂CH₂NH)ₙCH₂CH₂— amino (wherein amino can be, e.g., as described herein), —NHC(O)R (wherein R can be, e.g., alkyl, cycloalkyl, aryl, aralkyl, heteroaryl or sugar), cyano; mercapto; alkyl-thio-alkyl; thioalkoxy; and alkyl, cycloalkyl, aryl, alkenyl and alkynyl, which may be optionally substituted with e.g., an amino as described herein.

[1206] The sugar group can also contain one or more carbons that possess the opposite stereochemical configuration than that of the corresponding carbon in ribose. Thus, a modified nucleic acid can include nucleotides containing e.g., arabinose, as the sugar. The nucleotide “monomer” can have an alpha linkage at the 1′ position on the sugar, e.g., alpha-nucleosides. The modified nucleic acids can also include “abasic” sugars, which lack a nucleobase at C-1′. These abasic sugars can also be further modified at one or more of the constituent sugar atoms. The modified nucleic acids can also include one or more sugars that are in the L form, e.g., L-nucleosides.

[1207] Generally, RNA includes the sugar group ribose, which is a 5-membered ring having an oxygen. Exemplary modified nucleosides and modified nucleotides can include, without limitation, replacement of the oxygen in ribose (e.g., with sulfur (S), selenium (Se), or alkylene, such as, e.g., methylene or ethylene); addition of a double bond (e.g., to replace ribose with cyclopentenyl or cyclohexenyl); ring contraction of ribose (e.g., to form a 4-membered ring of cyclobutane or oxetane); ring expansion of ribose (e.g., to form a 6- or 7-membered ring having an additional carbon or heteroatom, such as for example, anhydrohexitol, altritol, mannitol, cyclohexanyl, cyclohexenyl, and morpholino that also has a phosphoramidate backbone). In an embodiment, the modified nucleotides can include multicyclic forms (e.g., tricyclo; and “unlocked” forms, such as glycol nucleic acid (GNA) (e.g., R-GNA or S-GNA, where ribose is replaced by glycol units attached to phosphodiester bonds), threose nucleic acid (TNA, where ribose is replaced with α-L-threofuranosyl-(3′→2′)).

[1208] Modifications on the Nucleobase

[1209] The modified nucleosides and modified nucleotides described herein, which can be incorporated into a modified nucleic acid, can include a modified nucleobase. Examples of nucleobases include, but are not limited to, adenine (A), guanine (G), cytosine (C), and uracil (U). These nucleobases can be modified or wholly replaced to provide modified nucleosides and modified nucleotides that can be incorporated into modified nucleic acids. The nucleobase of the nucleotide can be independently selected from a purine, a pyrimidine, a purine or pyrimidine analog. In an embodiment, the nucleobase can include, for example, naturally-occurring and synthetic derivatives of a base.

[1210] Uracil

[1211] In an embodiment, the modified nucleobase is a modified uracil. Exemplary nucleobases and nucleosides having a modified uracil include without limitation pseudouridine (ψ), pyridin-4-one ribonucleoside, 5-aza-uridine, 6-aza-uridine, 2-thio-5-aza-uridine, 2-thio-uridine (s2U), 4-thio-uridine (s4U), 4-thio-pseudouridine, 2-thio-pseudouridine, 5-hydroxy-uridine (ho⁵U), 5-aminoallyl-uridine, 5-halo-uridine (e.g., 5-iodo-uridine or 5-bromo-uridine), 3-methyl-uridine (m³U), 5-methoxy-uridine (mo⁵U), uridine 5-oxyacetic acid (cmo⁵U), uridine 5-oxyacetic acid methyl ester (mcmo⁵U), 5-carboxymethyl-uridine (cm⁵U), 1-carboxymethyl-pseudouridine, 5-carboxyhydroxymethyl-uridine (chm⁵U), 5-carboxyhydroxymethyl-uridine methyl ester (mchm⁵U), 5-methoxycarbonylmethyl-uridine (mcm⁵U), 5-methoxycarbonylmethyl-2-thio-uridine (mcm⁵s2U), 5-aminomethyl-2-thio-uridine (nm⁵s2U), 5-methylaminomethyl-uridine (mnm⁵U), 5-methylaminomethyl-2-thio-uridine (mnm⁵s2U), 5-methylaminomethyl-2-seleno-uridine (mnm⁵se²U), 5-carbamoylmethyl-uridine (ncm⁵U), 5-carboxymethylaminomethyl-uridine (cmnm⁵U), 5-carboxymethylaminomethyl-2-thio-uridine (cmnm⁵s2U), 5-propynyl-uridine, 1-propynyl-pseudouridine, 5-taurinomethyl-uridine (τcm⁵U), 1-taurinomethyl-pseudouridine, 5-taurinomethyl-2-thio-uridine(τm⁵s2U), 1-taurinomethyl-4-thio-pseudouridine, 5-methyl-uridine (m⁵U, i.e., having the nucleobase deoxythymine), 1-methyl-pseudouridine (m¹ψ), 5-methyl-2-thio-uridine (m⁵s2U), 1-methyl-4-thio-pseudouridine (m¹s⁴ψ), 4-thio-1-methyl-pseudouridine, 3-methyl-pseudouridine (m³ψ), 2-thio-1-methyl-pseudouridine, 1-methyl-1-deaza-pseudouridine, 2-thio-1-methyl-1-deaza-pseudouridine, dihydrouridine (D), dihydropseudouridine, 5,6-dihydrouridine, 5-methyl-dihydrouridine (m⁵D), 2-thio-dihydrouridine, 2-thio-dihydropseudouridine, 2-methoxy-uridine, 2-methoxy-4-thio-uridine, 4-methoxy-pseudouridine, 4-methoxy-2-thio-pseudouridine, N1-methyl-pseudouridine, 3-(3-amino-3-carboxypropyl)uridine (acp³U), 1-methyl-3-(3-amino-3-carboxypropyl)pseudouridine (acp³ψ), 5-(isopentenylaminomethyl)uridine (inm⁵U), 5-(isopentenylaminomethyl)-2-thio-uridine (inm⁵s2U), a-thio-uridine, 2′-O-methyl-uridine (Um), 5,2′-O-dimethyl-uridine (m⁵Um), 2′-O-methyl-pseudouridine (ψm), 2-thio-2′-O-methyl-uridine (s2Um), 5-methoxycarbonylmethyl-2′-O-methyl-uridine (mcm⁵Um), 5-carbamoylmethyl-2′-O-methyl-uridine (ncm⁵Um), 5-carboxymethylaminomethyl-2′-O-methyl-uridine (cmnm⁵Um), 3,2′-O-dimethyl-uridine (m³Um), 5-(isopentenylaminomethyl)-2′-O-methyl-uridine (inm⁵Um), 1-thio-uridine, deoxythymidine, 2′-F-ara-uridine, 2′-F-uridine, 2′-OH-ara-uridine, 5-(2-carbomethoxyvinyl) uridine, 5-[3-(1-E-propenylamino)uridine, pyrazolo[3,4-d]pyrimidines, xanthine, and hypoxanthine.

[1212] Cytosine

[1213] In an embodiment, the modified nucleobase is a modified cytosine. Exemplary nucleobases and nucleosides having a modified cytosine include without limitation 5-aza-cytidine, 6-aza-cytidine, pseudoisocytidine, 3-methyl-cytidine (m³C), N4-acetyl-cytidine (act), 5-formyl-cytidine (f⁵C), N4-methyl-cytidine (m⁴C), 5-methyl-cytidine (m⁵C), 5-halo-cytidine (e.g., 5-iodo-cytidine), 5-hydroxymethyl-cytidine (hm⁵C), 1-methyl-pseudoisocytidine, pyrrolo-cytidine, pyrrolo-pseudoisocytidine, 2-thio-cytidine (s2C), 2-thio-5-methyl-cytidine, 4-thio-pseudoisocytidine, 4-thio-1-methyl-pseudoisocytidine, 4-thio-1-methyl-1-deaza-pseudoisocytidine, 1-methyl-1-deaza-pseudoisocytidine, zebularine, 5-aza-zebularine, 5-methyl-zebularine, 5-aza-2-thio-zebularine, 2-thio-zebularine, 2-methoxy-cytidine, 2-methoxy-5-methyl-cytidine, 4-methoxy-pseudoisocytidine, 4-methoxy-1-methyl-pseudoisocytidine, lysidine (k²C), α-thio-cytidine, 2′-O-methyl-cytidine (Cm), 5,2′-O-dimethyl-cytidine (m⁵Cm), N4-acetyl-2′-O-methyl-cytidine (ac⁴Cm), N4,2′-O-dimethyl-cytidine (m⁴Cm), 5-formyl-2′-O-methyl-cytidine (f⁵Cm), N4,N4,2′-O-trimethyl-cytidine (m⁴₂Cm), 1-thio-cytidine, 2′-F-ara-cytidine, 2′-F-cytidine, and 2′-OH-ara-cytidine.

[1214] Adenine

[1215] In an embodiment, the modified nucleobase is a modified adenine. Exemplary nucleobases and nucleosides having a modified adenine include without limitation 2-amino-purine, 2,6-diaminopurine, 2-amino-6-halo-purine (e.g., 2-amino-6-chloro-purine), 6-halo-purine (e.g., 6-chloro-purine), 2-amino-6-methyl-purine, 8-azido-adenosine, 7-deaza-adenosine, 7-deaza-8-aza-adenosine, 7-deaza-2-amino-purine, 7-deaza-8-aza-2-amino-purine, 7-deaza-2,6-diaminopurine, 7-deaza-8-aza-2,6-diaminopurine, 1-methyl-adenosine (m¹A), 2-methyl-adenosine (m²A), N6-methyl-adenosine (m⁶A), 2-methylthio-N6-methyl-adenosine (ms2 m⁶A), N6-isopentenyl-adenosine (i⁶A), 2-methylthio-N6-isopentenyl-adenosine (ms²i⁶A), N6-(cis-hydroxyisopentenyl)adenosine (io⁶A), 2-methylthio-N6-(cis-hydroxyisopentenyl)adenosine (ms2io⁶A), N6-glycinylcarbamoyl-adenosine (g⁶A), N6-threonylcarbamoyl-adenosine (t⁶A), N6-methyl-N6-threonylcarbamoyl-adenosine (m⁶t⁶A), 2-methylthio-N6-threonylcarbamoyl-adenosine (ms²g⁶A), N6,N6-dimethyl-adenosine (m⁶₂A), N6-hydroxynorvalylcarbamoyl-adenosine (hn⁶A), 2-methylthio-N6-hydroxynorvalylcarbamoyl-adenosine (ms2hn⁶A), N6-acetyl-adenosine (ac⁶A), 7-methyl-adenosine, 2-methylthio-adenosine, 2-methoxy-adenosine, α-thio-adenosine, 2′-O-methyl-adenosine (Am), N⁶,2′-O-dimethyl-adenosine (m⁶Am), N⁶-Methyl-2′-deoxyadenosine, N6,N6,2′-O-trimethyl-adenosine (m⁶₂Am), 1,2′-O-dimethyl-adenosine (m¹Am), 2′-O-ribosyladenosine (phosphate) (Ar(p)), 2-amino-N6-methyl-purine, 1-thio-adenosine, 8-azido-adeno sine, 2′-F-ara-adenosine, 2′-F-adenosine, 2′-OH-ara-adenosine, and N6-(19-amino-pentaoxanonadecyl)-adenosine.

[1216] Guanine

[1217] In an embodiment, the modified nucleobase is a modified guanine. Exemplary nucleobases and nucleosides having a modified guanine include without limitation inosine (I), 1-methyl-inosine (m¹I), wyosine (imG), methylwyosine (mimG), 4-demethyl-wyosine (imG-14), isowyosine (imG2), wybutosine (yW), peroxywybutosine (o₂yW), hydroxywybutosine (OHyW), undermodified hydroxywybutosine (OHyW*), 7-deaza-guanosine, queuosine (Q), epoxyqueuosine (oQ), galactosyl-queuosine (galQ), mannosyl-queuosine (manQ), 7-cyano-7-deaza-guanosine (preQ₀), 7-aminomethyl-7-deaza-guanosine (preQ₁), archaeosine (G⁺), 7-deaza-8-aza-guanosine, 6-thio-guanosine, 6-thio-7-deaza-guanosine, 6-thio-7-deaza-8-aza-guanosine, 7-methyl-guanosine (m⁷G), 6-thio-7-methyl-guanosine, 7-methyl-inosine, 6-methoxy-guanosine, 1-methyl-guanosine (m′G), N2-methyl-guanosine (m²G), N2,N2-dimethyl-guanosine (m²₂G), N2,7-dimethyl-guanosine (m²,7G), N2, N2,7-dimethyl-guanosine (m²,2,7G), 8-oxo-guanosine, 7-methyl-8-oxo-guanosine, 1-methyl-6-thio-guanosine, N2-methyl-6-thio-guanosine, N2,N2-dimethyl-6-thio-guanosine, α-thio-guanosine, 2′-O-methyl-guanosine (Gm), N2-methyl-2′-O-methyl-guanosine (m²Gm), N2,N2-dimethyl-2′-O-methyl-guanosine (m²₂Gm), 1-methyl-2′-O-methyl-guanosine (m′Gm), N2,7-dimethyl-2′-O-methyl-guanosine (m²,7Gm), 2′-O-methyl-inosine (Im), 1,2′-O-dimethyl-inosine (m′Im), O⁶-phenyl-2′-deoxyinosine, 2′-O-ribosylguanosine (phosphate) (Gr(p)), 1-thio-guanosine, O⁶-methyl-guanosine, O⁶-Methyl-2′-deoxyguanosine, 2′-F-ara-guanosine, and 2′-F-guanosine.

[1218] Exemplary Modified gRNAs

[1219] In some embodiments, the modified nucleic acids can be modified gRNAs. It is to be understood that any of the gRNAs described herein can be modified in accordance with this section, including any gRNAs that comprises a targeting domain from SEQ ID NOs: 387-485, 6803-6871, and 16010-16256.

[1220] As discussed above, transiently expressed or delivered nucleic acids can be prone to degradation by, e.g., cellular nucleases. Accordingly, in one aspect the modified gRNAs described herein can contain one or more modified nucleosides or nucleotides which introduce stability toward nucleases. While not wishing to be bound by theory it is also believed that certain modified gRNAs described herein can exhibit a reduced innate immune response when introduced into a population of cells, particularly the cells of the present disclosure. As noted above, the term “innate immune response” includes a cellular response to exogenous nucleic acids, including single stranded nucleic acids, generally of viral or bacterial origin, which involves the induction of cytokine expression and release, particularly the interferons, and cell death.

[1221] While some of the exemplary modification discussed in this section may be included at any position within the gRNA sequence, in some embodiments, a gRNA molecule comprises a modification at or near its 5′ end (e.g., within 1-10, 1-5, or 1-2 nucleotides of its 5′ end). In some embodiments, a gRNA comprises a modification at or near its 3′ end (e.g., within 1-10, 1-5, or 1-2 nucleotides of its 3′ end). In some embodiments, a gRNA molecule comprises both a modification at or near its 5′ end and a modification at or near its 3′ end.

[1222] In an embodiment, the 5′ end of a gRNA is modified by the inclusion of a eukaryotic mRNA cap structure or cap analog (e.g., a G(5′)ppp(5′)G cap analog, a m7G(5′)ppp(5′)G cap analog, or a 3′-O-Me-m7G(5′)ppp(5′)G anti reverse cap analog (ARCA)). The cap or cap analog can be included during either chemical synthesis or in vitro transcription of the gRNA.

[1223] In an embodiment, an in vitro transcribed gRNA is modified by treatment with a phosphatase (e.g., calf intestinal alkaline phosphatase) to remove the 5′ triphosphate group.

[1224] In an embodiment, the 3′ end of a gRNA is modified by the addition of one or more (e.g., 25-200) adenine (A) residues. The polyA tract can be contained in the nucleic acid (e.g., plasmid, PCR product, viral genome) encoding the gRNA, or can be added to the gRNA during chemical synthesis, or following in vitro transcription using a polyadenosine polymerase (e.g., E. coli Poly(A)Polymerase).

[1225] In another aspect, methods and compositions discussed herein provide methods and compositions for gene editing by using a gRNA molecule which comprises a polyA tail. In one embodiment, a polyA tail of undefined length ranging from 1 to 1000 nucleotide is added enzymatically using a polymerase such as E. coli polyA polymerase (E-PAP). In one embodiment, the polyA tail of a specified length (e.g., 1, 5, 10, 20, 30, 40, 50, 60, 100, or 150 nucleotides) is encoded on a DNA template and transcribed with the gRNA via an RNA polymerase (e.g., T7 RNA polymerase). In one embodiment, a polyA tail of defined length (e.g., 1, 5, 10, 20, 30, 40, 50, 60, 100, or 150 nucleotides) is synthesized as a synthetic oligonucleotide and ligated on the 3′ end of the gRNA with either an RNA ligase or a DNA ligase with our without a splinted DNA oligonucleotide complementary to the guide RNA and the polyA oligonucleotide. In one embodiment, the entire gRNA including a defined length of polyA tail is made synthetically, in one or several pieces, and ligated together by either an RNA ligase or a DNA ligase with or without a splinted DNA oligonucleotide.

[1226] In an embodiment, in vitro transcribed gRNA molecule contains both a 5′ cap structure or cap analog and a 3′ polyA tract. In an embodiment, an in vitro transcribed gRNA is modified by treatment with a phosphatase (e.g., calf intestinal alkaline phosphatase) to remove the 5′ triphosphate group and comprises a 3′ polyA tract.

[1227] In some embodiments, gRNAs can be modified at a 3′ terminal U ribose. For example, the two terminal hydroxyl groups of the U ribose can be oxidized to aldehyde groups and a concomitant opening of the ribose ring to afford a modified nucleoside as shown below:

[chemical structure]

wherein “U” can be an unmodified or modified uridine.

[1228] In another embodiment, the 3′ terminal U can be modified with a 2′3′ cyclic phosphate as shown below:

[chemical structure]

wherein “U” can be an unmodified or modified uridine.

[1229] In some embodiments, the gRNA molecules may contain 3′ nucleotides which can be stabilized against degradation, e.g., by incorporating one or more of the modified nucleotides described herein. In this embodiment, e.g., uridines can be replaced with modified uridines, e.g., 5-(2-amino)propyl uridine, and 5-bromo uridine, or with any of the modified uridines described herein; adenosines and guanosines can be replaced with modified adenosines and guanosines, e.g., with modifications at the 8-position, e.g., 8-bromo guanosine, or with any of the modified adenosines or guanosines described herein.

[1230] In some embodiments, sugar-modified ribonucleotides can be incorporated into the gRNA molecule, e.g., wherein the 2′ OH-group is replaced by a group selected from H, —OR, —R (wherein R can be, e.g., alkyl, cycloalkyl, aryl, aralkyl, heteroaryl or sugar), halo, —SH, —SR (wherein R can be, e.g., alkyl, cycloalkyl, aryl, aralkyl, heteroaryl or sugar), amino (wherein amino can be, e.g., NH₂; alkylamino, dialkylamino, heterocyclyl, arylamino, diarylamino, heteroarylamino, diheteroarylamino, or amino acid); or cyano (—CN). In some embodiments, the phosphate backbone can be modified as described herein, e.g., with a phosphothioate group. In some embodiments, one or more of the nucleotides of the gRNA can each independently be a modified or unmodified nucleotide including, but not limited to 2′-sugar modified, such as, 2′-O-methyl, 2′-O-methoxyethyl, or 2′-Fluoro modified including, e.g., 2′-F or 2′-O-methyl, adenosine (A), 2′-F or 2′-O-methyl, cytidine (C), 2′-F or 2′-O-methyl, uridine (U), 2′-F or 2′-O-methyl, thymidine (T), 2′-F or 2′-O-methyl, guanosine (G), 2′-O-methoxyethyl-5-methyluridine (Teo), 2′-O-methoxyethyladenosine (Aeo), 2′-O-methoxyethyl-5-methylcytidine (m5Ceo), and any combinations thereof.

[1231] In some embodiments, a gRNA can include “locked” nucleic acids (LNA) in which the 2′ OH-group can be connected, e.g., by a C1-6 alkylene or C1-6 heteroalkylene bridge, to the 4′ carbon of the same ribose sugar, where exemplary bridges can include methylene, propylene, ether, or amino bridges; O-amino (wherein amino can be, e.g., NH₂; alkylamino, dialkylamino, heterocyclyl, arylamino, diarylamino, heteroarylamino, or diheteroarylamino, ethylenediamine, or polyamino) and aminoalkoxy or O(CH₂)ₙ-amino (wherein amino can be, e.g., NH₂; alkylamino, dialkylamino, heterocyclyl, arylamino, diarylamino, heteroarylamino, or diheteroarylamino, ethylenediamine, or polyamino).

[1232] In some embodiments, a gRNA can include a modified nucleotide which is multicyclic (e.g., tricyclo; and “unlocked” forms, such as glycol nucleic acid (GNA) (e.g., R-GNA or S-GNA, where ribose is replaced by glycol units attached to phosphodiester bonds), or threose nucleic acid (TNA, where ribose is replaced with a-L-threofuranosyl-(3′→2′)).

[1233] Generally, gRNA molecules include the sugar group ribose, which is a 5-membered ring having an oxygen. Exemplary modified gRNAs can include, without limitation, replacement of the oxygen in ribose (e.g., with sulfur (S), selenium (Se), or alkylene, such as, e.g., methylene or ethylene); addition of a double bond (e.g., to replace ribose with cyclopentenyl or cyclohexenyl); ring contraction of ribose (e.g., to form a 4-membered ring of cyclobutane or oxetane); ring expansion of ribose (e.g., to form a 6- or 7-membered ring having an additional carbon or heteroatom, such as for example, anhydrohexitol, altritol, mannitol, cyclohexanyl, cyclohexenyl, and morpholino that also has a phosphoramidate backbone). Although the majority of sugar analog alterations are localized to the 2′ position, other sites are amenable to modification, including the 4′ position. In an embodiment, a gRNA comprises a 4′-S, 4′-Se or a 4′-C-aminomethyl-2′-O-Me modification.

[1234] In some embodiments, deaza nucleotides, e.g., 7-deaza-adenosine, can be incorporated into the gRNA molecule. In some embodiments, O- and N-alkylated nucleotides, e.g., N6-methyl adenosine, can be incorporated into the gRNA molecule. In some embodiments, one or more or all of the nucleotides in a gRNA molecule are deoxynucleotides.

[1235] miRNA Binding Sites

[1236] microRNAs (or miRNAs) are naturally occurring cellular 19-25 nucleotide long noncoding RNAs. They bind to nucleic acid molecules having an appropriate miRNA binding site, e.g., in the 3′ UTR of an mRNA, and down-regulate gene expression. While not wishing to be bound by theory it is believed that this down regulation occurs either by reducing nucleic acid molecule stability or by inhibiting translation. An RNA species disclosed herein, e.g., an mRNA encoding Cas9 can comprise an miRNA binding site, e.g., in its 3′UTR. The miRNA binding site can be selected to promote down regulation of expression is a selected cell type. By way of example, the incorporation of a binding site for miR-122, a microRNA abundant in liver, can inhibit the expression of the gene of interest in the liver.

### EXAMPLES

[1237] The following Examples are merely illustrative and are not intended to limit the scope or content of the invention in any way.

### Example 1

### Cloning and Initial Screening of gRNA Molecules

[1238] The suitability of candidate gRNA molecules can be evaluated as described in this example. Although described for a chimeric gRNA molecule, the approach can also be used to evaluate modular gRNA molecules.

[1239] Cloning gRNAs into Vectors

[1240] For each gRNA molecule, a pair of overlapping oligonucleotides is designed and obtained. Oligonucleotides are annealed and ligated into a digested vector backbone containing an upstream U6 promoter and the remaining sequence of a long chimeric gRNA molecule. Plasmid is sequence-verified and prepped to generate sufficient amounts of transfection-quality DNA. Alternate promoters maybe used to drive in vivo transcription (e.g., H1 promoter) or for in vitro transcription (e.g., a T7 promoter).

[1241] Cloning gRNAs in Linear dsDNA Molecule (STITCHR)

[1242] For each gRNA molecule, a single oligonucleotide is designed and obtained. The U6 promoter and the gRNA scaffold (e.g., including everything except the targeting domain, e.g., including sequences derived from the crRNA and tracrRNA, e.g., including a first complementarity domain; a linking domain; a second complementarity domain; a proximal domain; and a tail domain) are separately PCR amplified and purified as dsDNA molecules. The gRNA-specific oligonucleotide is used in a PCR reaction to stitch together the U6 and the gRNA scaffold, linked by the targeting domain specified in the oligonucleotide. Resulting dsDNA molecule (STITCHR product) is purified for transfection. Alternate promoters may be used to drive in vivo transcription (e.g., H1 promoter) or for in vitro transcription (e.g., T7 promoter). Any gRNA scaffold may be used to create gRNAs compatible with Cas9s from any bacterial species.

[1243] Initial gRNA Screen

[1244] Each gRNA to be tested is transfected, along with a plasmid expressing Cas9 and a small amount of a GFP-expres sing plasmid into human cells. In preliminary experiments, these cells can be immortalized human cell lines such as 293T, K562 or U2OS. Alternatively, primary human cells may be used. In this case, cells may be relevant to the eventual therapeutic cell target (for example, an erythroid cell). The use of primary cells similar to the potential therapeutic target cell population may provide important information on gene targeting rates in the context of endogenous chromatin and gene expression.

[1245] Transfection may be performed using lipid transfection (such as Lipofectamine or Fugene) or by electroporation (such as Lonza Nucleofection). Following transfection, GFP expression can be determined either by fluorescence microscopy or by flow cytometry to confirm consistent and high levels of transfection. These preliminary transfections can comprise different gRNAs and different targeting approaches (17-mers, 20-mers, nuclease, dual-nickase, etc.) to determine which gRNAs/combinations of gRNAs give the greatest activity.

[1246] Efficiency of cleavage with each gRNA may be assessed by measuring NHEJ-induced indel formation at the target locus by a T7E1-type assay or by sequencing. Alternatively, other mismatch-sensitive enzymes, such as Cell/Surveyor nuclease, may also be used.

[1247] For the T7E1 assay, PCR amplicons are approximately 500-700 bp with the intended cut site placed asymmetrically in the amplicon. Following amplification, purification and size-verification of PCR products, DNA is denatured and re-hybridized by heating to 95° C. and then slowly cooling. Hybridized PCR products are then digested with T7 Endonuclease I (or other mismatch-sensitive enzyme) which recognizes and cleaves non-perfectly matched DNA. If indels are present in the original template DNA, when the amplicons are denatured and re-annealed, this results in the hybridization of DNA strands harboring different indels and therefore lead to double-stranded DNA that is not perfectly matched. Digestion products may be visualized by gel electrophoresis or by capillary electrophoresis. The fraction of DNA that is cleaved (density of cleavage products divided by the density of cleaved and uncleaved) may be used to estimate a percent NHEJ using the following equation: % NHEJ=(1-(1-fraction cleaved)^{1/2}). The T7E1 assay is sensitive down to about 2-5% NHEJ.

[1248] Sequencing may be used instead of, or in addition to, the T7E1 assay. For Sanger sequencing, purified PCR amplicons are cloned into a plasmid backbone, transformed, miniprepped and sequenced with a single primer. Sanger sequencing may be used for determining the exact nature of indels after determining the NHEJ rate by T7E1.

[1249] Sequencing may also be performed using next generation sequencing techniques. When using next generation sequencing, amplicons may be 300-500 bp with the intended cut site placed asymmetrically. Following PCR, next generation sequencing adapters and barcodes (for example Illumina multiplex adapters and indexes) may be added to the ends of the amplicon, e.g., for use in high throughput sequencing (for example on an Illumina MiSeq). This method allows for detection of very low NHEJ rates.

### Example 2

### Assessment of Gene Targeting by NHEJ

[1250] The gRNAs that induce the greatest levels of NHEJ in initial tests can be selected for further evaluation of gene targeting efficiency. In this case, cells are derived from disease subjects and, therefore, harbor the relevant mutation.

[1251] Following transfection (usually 2-3 days post-transfection,) genomic DNA may be isolated from a bulk population of transfected cells and PCR may be used to amplify the target region. Following PCR, gene targeting efficiency to generate the desired mutations (either knockout of a target gene or removal of a target sequence motif) may be determined by sequencing. For Sanger sequencing, PCR amplicons may be 500-700 bp long. For next generation sequencing, PCR amplicons may be 300-500 bp long. If the goal is to knockout gene function, sequencing may be used to assess what percent of alleles have undergone NHEJ-induced indels that result in a frameshift or large deletion or insertion that would be expected to destroy gene function. If the goal is to remove a specific sequence motif, sequencing may be used to assess what percent of alleles have undergone NHEJ-induced deletions that span this sequence.

### Example 3

### Assessment of Gene Targeting by HDR

[1252] The gRNAs that induce the greatest levels of NHEJ in initial tests can be selected for further evaluation of gene targeting efficiency. In this case, cells are derived from disease subjects and, therefore, harbor the relevant mutation.

[1253] Following transfection (usually 2-3 days post-transfection,) genomic DNA may be isolated from a bulk population of transfected cells and PCR may be used to amplify the target region. Following PCR, gene targeting efficiency can be determined by several methods.

[1254] Determination of gene targeting frequency involves measuring the percentage of alleles that have undergone homologous directed repair (HDR) with the exogenou sly provided donor template or endogenous genomic donor sequence and which therefore have incorporated the desired correction. If the desired HDR event creates or destroys a restriction enzyme site, the frequency of gene targeting may be determined by a RFLP assay. If no restriction site is created or destroyed, sequencing may be used to determine gene targeting frequency. If a RFLP assay is used, sequencing may still be used to verify the desired HDR event and ensure that no other mutations are present. If an exogenously provided donor template is employed, at least one of the primers is placed in the endogenous gene sequence outside of the region included in the homology arms, which prevents amplification of donor template still present in the cells. Therefore, the length of the homology arms present in the donor template may affect the length of the PCR amplicon. PCR amplicons can either span the entire donor region (both primers placed outside the homology arms) or they can span only part of the donor region and a single junction between donor and endogenous DNA (one internal and one external primer). If the amplicons span less than the entire donor region, two different PCRs should be used to amplify and sequence both the 5′ and the 3′ junction.

[1255] If the PCR amplicon is short (less than 600 bp) it is possible to use next generation sequencing. Following PCR, next generation sequencing adapters and barcodes (for example Illumina multiplex adapters and indexes) may be added to the ends of the amplicon, e.g., for use in high throughput sequencing (for example on an Illumina MiSeq). This method allows for detection of very low gene targeting rates.

[1256] If the PCR amplicon is too long for next generation sequencing, Sanger sequencing can be performed. For Sanger sequencing, purified PCR amplicons are cloned into a plasmid backbone (for example, TOPO cloned using the LifeTech Zero Blunt® TOPO® cloning kit), transformed, miniprepped and sequenced.

[1257] The same or similar assays described above can be used to measure the percentage of alleles that have undergone HDR with endogenous genomic donor sequence and which therefore have incorporated the desired correction.

### Example 4

### Gene Targeting of the HBB Locus by CRISPR/Cas9 to Investigate Repair Pathway Choice in Response to Different Types of DNA Lesions

[1258] The CRISPR/Cas9 system was used to target the human HBB gene in the region of the sickle cell anemia-causing mutation.

[1259] To examine how the nature of the targeted break affects the frequency of different DNA repair outcomes, blunt double-strand breaks, single-strand nicks, and dual-nicks in which the nicks are placed on opposite strands and leave either 3′ or 5′ overhangs of varying lengths, were introduced by utilizing the wild type Cas9 nuclease, as well as two different Cas9 nickases. Several different DNA repair outcomes including indel mutations resulting from non-homologous end-joining, homology-dependent repair (HDR) using an exogenous donor as a template (i.e., gene correction), and HDR using the closely related HBD gene as an endogenous template (i.e., gene conversion), were characterized using either single-strand oligonucleotide (ssODN) or plasmid DNA donors. The frequency of these various repair outcomes under different conditions offer insight into the mechanisms of DNA repair and how it is impacted by the nature of the DNA break. The data also indicates a therapeutic approach in which correction of the sickle-cell mutation is efficiently mediated through HDR with either a donor template or with the HBD gene.

[1260] In this study different gRNA molecules for the HBB region that surrounds the nucleotides encoding the amino acid most commonly mutated in sickle cell disease had been tested in 293T cells with wild type Cas9 molecule. The gRNAs that induced similar high rates of NHEJ and had PAMs facing in opposite orientations (e.g., each PAM is oriented 5′ relative to a mutation on the first and second strands, respectively) were selected to test as pairs with Cas9 D10A and Cas9 N863A nickases.

[1261] As shown in FIG. 1, the gRNA pair 8/15 (“8gRNA”/“15gRNA” pair) was selected as one of the best pairs of gRNA molecules. “8gRNA” has the targeting domain sequence of GUAACGGCAGACUUCUCCUC (SEQ ID NO: 388) and “15gRNA” has the targeting domain sequence of AAGGUGAACGUGGAUGAAGU (SEQ ID NO: 387). This pair of gRNAs in combination with the mutant Cas9 D10A would generate a 5′ overhang of 47 bp, and in combination with the mutant N863A would generate a 3′ overhang of 47 bp. Different overhang structures are believed to have different properties for engaging different repair mechanisms. To address repair efficacy and repair outcomes in a systematic manner, U2OS cells with respective Cas9 variants and gRNAs were used.

[1262] U2OS cells were electroporated with 200 ng of each gRNA and 750 ng of plasmid that encodes wild type Cas9 or mutant Cas9. Cells were collected 6 days after electroporation and genomic DNA was extracted. PCR amplification of the HBB locus was performed and subcloned into a Topo Blunt Vector. For each condition in each experiment 96 colonies were sequenced with Sanger sequencing. In the experiments assessing HDR efficacy, cells were electroporated with 2.5 ug of single stranded oligo or double stranded oligo in addition to the gRNA and the Cas9-encoding plasmid.

[1263] As shown in FIG. 2, the similar rates of overall modification at the HBB locus were generated using wild type Cas9 or Cas9 nickases (D10A, N863A), as detected by Sanger sequencing, suggesting a similar rate in error prone repair independent of the Cas9-induced DNA lesion.

[1264] FIGS. 3A-3B show that a majority of the total gene editing events (about ¾ of the total) were small deletions (<10 bp). This is consistent with the notion that wild type Cas9 generates a blunt end which are preferentially repaired by canonical NHEJ. In contrast, deletions represented only about a quarter of the total events using either nickase (D10A or N863A). Moreover, larger deletions of ˜50 bp that can be mapped to the region between the two nickase sites were observed (FIGS. 3A and 3C). The remaining gene-editing events were substantially different between the two nickases.

[1265] As shown in FIG. 4A, in the case of Cas9 D10A nickase, which leaves a 5′ protruding end, the lesion is mostly repaired through a mechanism defined as gene conversion. In gene conversion, the HBD locus will serve as a template to repair the HBB gene. HBD is a highly similar gene (92% identity with HBB) that does not carry the sickle-cell mutation (FIG. 4B). FIG. 5 shows that the majority of the HBD sequence that were incorporated in the HBB locus were in the region between the nickase cuts. In contrast, a low frequency of gene conversion was observed when the Cas9 N863 nickase was used (FIG. 4A). In the case of Cas9 N863A nickase, a majority of the gene editing events were insertions in which the inserted part was a duplication of the overhangs (FIGS. 6A-6B).

[1266] FIG. 7A shows compiled data of the gene editing events resulting from DNA lesions generated by the three different Cas9 variants. While similar rates of overall modification at the HBB locus were observed, the distribution of the resulting type of repair outcome dramatically differed. 12.4% of WT Cas9-induced modifications harbored the footprint of the highly homologous HBD gene (a phenomenon known as “gene conversion”). In gene conversion, the HBD locus will serve as a template to repair the HBB gene. HBD is a highly similar gene (92% identity with HBB) that does not carry the sickle-cell mutation (FIG. 6B). The HBD gene lies approximately 7.6 kb upstream of the HBB gene on chromosome 11. The rate of gene conversion from the HBD gene was significantly enhanced when lesions were induced using the Cas9 D10A nickase. 32.8% of D10A Cas9-induced modifications were resolved by gene conversion. In contrast, 3.5% of N863A Cas9-induced modifications were resolved by gene conversion. Overall, this data suggested that DNA cleavage induced by the Cas9 D10A nickase are particularly amenable for gene conversion from the endogenous HBD gene. These data also suggest that the different DNA ends generated with different Cas9 variants activate different DNA repair pathway responses.

[1267] FIG. 7B shows the distribution of deletion size resulting from DNA lesions generated by the three different Cas9 variants. Specifically, WT Cas9-induced lesions were predominantly resolved as deletions. Deletions were also frequently observed when using the gRNA pair 8/15 with either the Cas9 D10A nickase or Cas9 N863A nickase. WT Cas9 induced deletions were predominantly small in size (median deletion size=3 nucleotides (nts)). Cas9 D10A nickase-induced deletions and Cas9 N863A nickase-induced deletions were significantly larger in size (median deletion size=28 nts and 36 nts, for Cas9 N863A and Cas9 D10A, respectively).

[1268] To determine whether the DNA repair events observed were representative of events occurring in single cells, and not the result of PCR bias during amplification of the DNA from a population of cells, repair outcomes were analyzed from a single U2Os cell clones (˜80 single clones per condition) after nucleofection with each of the three Cas9 variants. As shown in FIG. 8A, the repair event distribution was very similar in individual clones to the distribution observed in parental population of mixed cells. Similar repair event distribution was observed using the myeloid leukemia cell line K562 (FIG. 8B). These data suggest that the DNA ends generated with the different Cas9 variants activate different DNA repair pathway responses.

[1269] To better understand the molecular pathways responsible for the gene conversion pathway, Cas9 D10A nickase-induced gene conversion tracts were analyzed in detail. The region located between the 8gRNA/15gRNA pair was converted to the HBD sequence in approximately 80% of all gene conversion cases, as detected by analyzing single nucleotide polymorphisms (SNPs) that perfectly matched the HBD sequence (FIG. 9). Directionality in the gene conversion tracts was observed, suggesting that perhaps the homology arm to the right of 8gRNA more frequently engages in homology pairing with the HBD locus due to the presence of longer stretches of uninterrupted homology, resulting in effective gene conversion (FIG. 9). In contrast, the arm to the left of 15gRNA harbors more homology-disrupting SNPs, which we speculated could result in a higher frequency of heteroduplex rejection at the HBD site.

[1270] Gene conversion is a highly precise mechanism that repairs DSBs during the S/G2 phases of the cell cycle through the homologous recombination (HR) pathway. The genetic requirements of HR have been characterized. Briefly, initially 3-5′ resection leads to the exposure of a single stranded 3′ overhang. Subsequently, BRCA2-dependent RAD51 loading onto the single stranded DNA initiates homology search and strand invasion. To determine whether gene conversion proceeds through the HR pathway, BRCA2 and RAD51 were knocked-down using siRNA in U2OS cells, and gene conversion analyzed following Cas9 D10A nickase-induced lesions (FIG. 10A). Gene conversion outcomes were significantly decreased when either BRCA2 or RAD51 were knocked down, indicating that both genes are required for efficient gene conversion and suggesting that gene conversion from the HBD locus proceeds through the HR pathway (FIG. 10B).

[1271] To investigate the fate of the predicted Cas9 N863A nickase-induced 3′ overhang structure, the repair outcome of these lesions was analyzed in detail. While the predominant repair outcome for these lesions was insertions (29.9% of all modifications, as compared to 9.0% for modifications induced by the Cas9 D10A nickase), the majority of the insertions mapped to the overhang (98.5% of insertions), while only 71.4% of insertions induced by the Cas9 D10 nickase mapped to the overhang (FIG. 11A). Cas9 N863A nickase-induced insertions are significantly longer than the insertions induced by Cas9 D10A nickase (FIG. 11B). Cas9 N863A nickase-induced insertions also predominantly stem from the central part of the overhang, which is different from the Cas9 D10A nickase-induced insertions, which mostly derive from the first 20 nts of the overhang structure (FIG. 12A). Moreover, Cas9 N863A nickase-induced insertions more frequently contained several (up to seven) repetitions of the entire 47 nts overhang structure generated upon cleavage, and in all cases of full overhang repetition, microhomology usage was evident (FIGS. 11A and 12B). These observations suggest a mechanistic difference between the Cas9 N863A nickase- and Cas9 D10A nickase-induced insertions. To test the effect that different lesions had on the engagement of HDR, a donor template was provided as a single-strand oligo or as ds DNA donor. In both cases the length of the donor is approximately 170 bp with 60 bp of homology outside the nicks and with 8 mismatches (FIG. 13A). As shown in FIG. 13B, the Cas9 D10A nickase that resulted in a 5′ overhang resulted in a significantly higher rate of HDR, especially when using the upper stand as a single-strand oligo donor. FIG. 13C shows different forms of donors (dsDNA, upper stand, and lower strand) and there contribution to HDR.

[1272] To further investigate the different repair outcomes resulting from the use of the different Cas9 variants, gene correction efficiency using a 179 nt ssODN that targets the HBB locus in the area of the sickle mutation was tested. Similar to the outcome observed during gene conversion, Cas9 D10A nickase, which creates a 5′ overhang, yielded the highest rate of gene correction (23.8% for Cas9 D10A nickase, as compared to 7.7% for WT Cas9 (p=0.0024) and 7.5% for Cas9 N863A nickase (p=0.0016)) (FIG. 14). To further dissect the genetic requirements of the ssODN gene correction approach, HR components BRCA2 and RAD51 were knocked down using siRNA, No change in gene correction frequency was observed, indicating that gene correction using a ssODN proceeds through a pathway that is independent of BRCA2 and RAD51 (FIG. 10C).

[1273] Given the differences in repair outcome and repair pathway engagement observed using the different Cas9 variants using a paired nickase strategy, repair outcome and repair pathway engagement resulting from a single nicking strategy was investigated.

[1274] First, the repair outcome in cells treated with the Cas9 D10A nickase with either a single gRNA or two gRNA molecules was analyzed. As shown in FIG. 15, gene conversion was observed with Cas9 D10A nickase with a single gRNA molecule (i.e., 8gRNA or 15 gRNA), as compared to two gRNA molecules (8gRNA/15gRNA pair). With a single gRNA, a reduction in the overall frequency of gene editing events was observed, as compared to the use of a pair of gRNA molecules. However, a similar distribution of the different types of editing events was maintained.

[1275] In additional experiments, the repair outcome and repair pathway engagement was examined in cells treated with the 8gRNA in combination with either the Cas9 D10A nickase, which results in a single DNA nick in the target strand, with the Cas9 N863A nickase, which results in a single DNA nick in the non-target strand, or with the control WT Cas9, which results in a blunt double stranded break. The overall modification frequency observed for WT Cas9-induced lesions was significantly higher than that observed for the Cas9 D10A nickase- and Cas9 863A nickase-generated single nicks (66.3% for WT Cas9, as compated to 4.6% for Cas9 D10A nickase and 1.3% for Cas9 N863A nickase) (FIG. 16A). This difference suggests the presence of a highly efficient single nick repair mechanism. To determine whether the difference in detectable repair events between Cas9 D10A nickase-induced single nick lesions and Cas9 N863A nickase-induced single nick lesions (approximately 4 fold; 4.6% for Cas9 D10A nickase vs. 1.3% for Cas9 N863A nickase, p=3.1×10⁻⁶) was attributable to differences in cutting efficiency between the two nickase variants, an in vitro DNA cutting assay was performed in which a gel-shifted DNA band indicates successful DNA cleavage. No significant differences in cutting efficiency between the Cas9 D10A nickase or the Cas9 N863A nickase were observed (FIG. 16B), suggesting that either the DNA repair of Cas9 N863A nickase-induced single nick of the non-target strand proceeds more efficiently than the repair of the cleaved target DNA strand, or that Cas9 D10A nickase-induced nick results in a more mutagenic intermediate.

[1276] To determine whether gene correction and gene conversion events that result from single nicking using a Cas9 nickase variant proceed through similar pathways as described above for the paired nickase approach (i.e., utilizing a gRNA pair and Cas9 nickase), BRCA2 and RAD51 were knocked-down using siRNA in U2OS cells, and repair outcomes analyzed. Gene conversion was dependent on RAD51 for WT Cas9-, Cas9 D10A nickase-, and Cas9 N863A nickase-induced single nicks (FIGS. 17A and 18A). An approximately 6-fold increase in gene correction was observed upon RAD51 knockdown for Cas9 D10A nickase-induced single nicks (from 1.0% in FF control to 6.24% in siRAD51-treated cells). However, an increase in gene correction was not observed upon RAD51 knockdown for Cas9 N863A nickase-induced single nicks (FIGS. 17A and 18A). Similar results were obtained with BRCA2 depletion (FIG. 17A). An equivalent simultaneous increase in overall modifications for Cas9 D10A nickase-induced nicks was also observed upon RAD51 knockdown (from 6.1% with the FF control to 48.4% in siRAD51-treated cells), without a relative increase in gene correction efficiency (FIGS. 17A and 18A). A significant increase in the size of deletions resulting from Cas9 D10A nickase-induced single nicks was also observed upon RAD51 knockdown (FIG. 18B). Overall, these observations suggest that Cas9 D10A nickase-induced nicks are converted to double stranded breaks during S-phase and are then repaired by more error prone pathways than HR. It is possible that Cas9 D10A nickase-induced lesions might not be sensed until S-phase, when they are converted to DSBs (see, e.g., Mayle 2015; Saleh-Gohari 2005; Neelsen and Lopes 2015). This may be due to the inability of RAD51- and BRCA2-deficient cells to undergo replication fork remodeling to prevent replication fork run-off or undesirable processing at the Cas9 D10A nickase-induced nick (FIG. 18C, left panel) (see, e.g., Neelsen and Lopes 2015; Schlacher 2011; Zellweger 2015). Alternatively, the high degree of locus disruption could be due to the inability of RAD51/BRCA2 deficient cells to complete HR if run-off has occurred (FIG. 18C, right panel). The observed increase in the size of the deletions in the absence of RAD51 could suggest the involvement of A-NHEJ pathways in the repair of Cas9 D10A nickase-induced nicks during S-phase. These data cumulatively provide evidence that both RAD51 and BRCA2 are critical in promoting high fidelity repair of nicks that escape the SSBR pathway.

[1277] In summary, Cas9 nickases (D10A and N863A) showed comparable levels of efficacy compared to wild type Cas9. Different DNA ends engage different repair pathways. The use of a wild type Cas9 generates a blunt end, which are preferentially repaired by canonical NHEJ. Use of a Cas9 nickase with two gRNAs generates either 3′ or 5′ overhangs, which are not suitable substrates to be repaired by canonical NHEJ but can be repaired by alternative pathways.

[1278] The 5′ protruding end was mostly repaired through a mechanism called gene conversion in which the HBB gene is repaired by using the HBD locus as a template. Use of nickase is advantageous to promote HDR. In the experiments in which a donor was provided, a significantly higher rate of HDR was observed using the Cas9 D10A nickase as compared to the wild type Cas9. Also, a significantly higher rate of gene correction was observed using the Cas9 D10A nickase as compared to the wild type Cas9 or the Cas9 N863A nickase. The nature of the donor template influences the outcome as HDR was preferentially observed when a single stranded (SS) oligo was used.

[1279] Methods

[1280] gRNA selection and production—A list of gRNAs directing S. pyogenes Cas9 were designed to target the human hemoglobin beta (HBB) locus requiring a NGG PAM (protospacer adjacent motif). Potential gRNAs were aligned against the human genome sequence to identify potential off-target sites. Variations in PAM sequence (NGG or NAG) were allowed for gRNAs with spacer lengths of 20 nucleotides. Primers containing gRNA sequences were synthesized (Integrated DNA Technologies (IDT)). gRNAs 8 and 15 were generated by cloning annealed gRNA sequence oligos containing the target sequence into pMLM3636 (Addgene plasmid #43860) which contains a S. pyogenes Cas9-TRACR and a customizable U6-driven gRNA scaffold. Plasmid DNA was purified using MaxiPrep Kit (ThermoFisher) and sequences were confirmed by Sanger sequencing.

[1281] Cell lines and cell culture—HEK293 (ATCC #CRL-1573), K562 (ATCC #CCL-243) and U2-OS (ATCC #HTB-96) cells were maintained in Dulbecco's Modified Eagle Medium (DMEM; Life Technologies) supplemented with 10% fetal bovine serum (FBS) and 5% penicillin/streptomycin, and 2 mM Glutamax. Cells were kept at 37° C. in a 5% CO₂ incubator.

[1282] Transfections/Electroporations—2.5×10⁵ cells were transfected using the Lonza 4D Nucleofector (AAF-1002B 4D-Nucleofector™ Core unit, AAF-1002X 4D-Nucleofector™ X unit, SE Cell Line 4D-Nucleofector X Kit S V4XC-1032) with 200 ng of gRNA plasmid and 750 ng of Cas9-variant encoding plasmid (pJDS246-WT; Cas9/pAF001-N863A; Cas9/pJDS271-D10ACas9) in the presence or absence of 50 pmol single-stranded deoxynucleotide donor (ssODN) using the DN-100 program. After nucelofection, cells were incubated at room temperature for 10 min. and then resuspended in complete DMEM before transfer to 6-well plates containing pre-warmed media. Media was changed 72 hours after nucleofection, and cells were harvested 5 days post nucleofection

[1283] siRNA Knockdowns—To knock down BRCA2 and RAD51, immediately before nucleofection with Cas9-variant encoding plasmid and gRNA(s), cells were treated with 30 pmols of siBRCA2 (siGENOME Human BRCA2 (675) siRNA-SMARTpool; M-003462-01-0005), 15 pmols of both siRAD51 (siGENOME Human RAD51 (5888) siRNA; D-003530-05-0005), or 15 pmols of control firefly luciferase siRNA (“FF”) (FF siRNA; CTM-127256). Samples were collected for gDNA extraction and further processing 5 days after nucleofection and knockdown efficiency assessed by Western Blot.

[1284] Genomic DNA Analysis—Genomic DNA was extracted from cells (Beckman Coulter Agencourt DNAdvance #A48706) according to the manufacturer's directions. The targeted genomic region of HBB was amplified by PCR in a 50 μl reaction mixture (10 μL of 5× Phusion HF buffer; 0.5 μM forward primer (F1_HBB, 5′-AGGCCATCACTAAAGGCACC (SEQ ID NO: 16313)); 0.5 μM reverse primer (R_HBB, 5′-TAAGCCAGTGCCAGAAGAGC (SEQ ID NO:16314)); 200 μM dNTP; 1.5 μL DMSO; 0.5 μl of Phusion polymerase; 100 ng of gDNA template) using the following PCR conditions: 30 s at 98° C. for initial denaturation, followed by 30 cycles of 10 seconds (s) at 98° C. for denaturation, 15 s at 64° C. for annealing, 30 s at 72° C. for extension, and 5 minutes at 72° C. for the final extension. PCR products were purified using (1.8×) Agencourt AMPure XP beads (Beckman Coulter Agencourt AMPure XP-PCR Purification #A63882) as directed by the manufacturer. Amplified locus fragments were cloned into pCR4-TOPO vectors using the ZeroBlunt TOPO Cloning Kit (Life Technologies Cat. No. #K287540) and transformed in One Shot Top10 chemically competent E. coli cells. Cells were plated on carbenicillin LB agar plates and incubated overnight at 37° C. Plasmid DNA from 96 colonies per sample was sequenced at Macrogen Corp. and Genewiz, Inc. using an M13 forward or reverse primer.

[1285] Single cell cloning—2.5×10⁵ U2OS cells per condition were nucleofected using Lonza 4D Nucleofector (AAF-1002B 4D-NucleofectorTM Core unit, AAF-1002X 4D-Nucleofector™ X unit). The cells were plated in 6 well dishes. For each of the conditions, 0.3 cells/well were plated in 3×96 well plates. After 3 weeks, the 96 well plates were visually scored using microscopy for single colony formations. More than 80 clones were picked for each condition and analyzed by TOPO cloning the PCR products of the amplified locus. Competent cells were plated onto divided bioassay plates with LB agar containing ampicillin (Molecular Devices Vented QTray, Fischer Scientific Cat. No. # NC0183882) and 6 colonies were picked for each subclone. Genomic DNA was extracted from cells using DNAdvance kits (Beckman Coulter Agencourt DNAdvance—Nucleic Acid Isolation from Mammalian Tissue #A48706). The HBB locus of the genomic DNA from individual clones was analyzed as described above. 6 colonies were analyzed for each subclone.

[1286] Illumina Next Generation Sequencing—Two rounds of PCR were performed on gDNA. The first round of amplification was used to amplify the HBB locus. Amplification was performed in a 50 μl reaction volume, (10 μL of 5× HercII buffer; 0.5 μM forward primer (HBB Miseq 1F: 5′ CCATCTCATCCCTGCGTGTCTCCGACCACCAGCAGCCTAAGG (SEQ ID NO:16315)); 0.5 μM reverse primer (HBB Miseq 1R: 5′ CCTCTCTATGGGCAGTCGGTGATGGCCATCTATTGCTTACATTTGCT (SEQ ID NO:16316)); 50 μM dNTP; 50 mM MgCl₂; 0.5 μl of HercII polymerase; 250 ng of gDNA template) using the following conditions: 2 min. at 95° C. for initial denaturation, followed by 30 cycles of 20 s at 95° C. for denaturation, 20 s at 60° C. for annealing, 20 s at 72° C. for extension, and 3 min. at 72° C. for the final extension. A second round of PCR amplification was performed to incorporate the P7 and P5 Illumina adapters and a unique 8-mer barcode sequence in a 50 μl reaction mixture (10 μL of 5× HercII buffer; 0.5 μM forward primer; 0.5 μM reverse primer; 50 uM dNTP; 0.5 ul of HercII polymerase; 3 ul of round 1 PCR product) using the amplification conditions as the first round of PC R amplification. PCR products were purified using (1.8×) Agencourt AMPure XP beads, as directed by the manufacturer, eluted in 40 μl of H₂O, and size verified by capillary electrophoresis using the Qiagen QIAxcel Advanced System. PCR products were quantified using Picogreen, normalized into one library pool and sequenced on the Illumina MiSeq according to the manufacturer's protocols.

[1287] Quantification of editing events in NGS data—The CRISPResso software (v0.9.1)(see, e.g., Pinello et al.) was used to identify editing events in high-throughput sequencing data and determine the frequencies of insertion, deletion, gene conversion and gene correction events. To identify insertions and deletions events, CRISPResso default settings were used to obtain the number of reads with either insertions or deletions. To identify gene conversion and gene correction events, CRISPResso was used separately for each sample and potential HDR template (i.e., the orthologous HBD sequence and the ssODN) with a required sequence similarity of 95% (using the hdr_perfect_alignment_threshold parameter).

[1288] Determination of insertion sizes—To identify insertions from Sanger sequencing data, the Needleman-Wunsch algorithm implementation in the Biopython (pairwise2.globalms) package was used with the following parameters: base match score=2, base mismatch penalty=−1, gap open penalty=−50, gap extend penalty=−1. Insertion sequences were identified by taking the contiguous bases aligned to gap characters in the reference sequence.

[1289] Overhang analysis—Overhang sequence was identified as located between the two predicted cleavage sites for guide RNA pairs, under the assumption that cleavage occurs three nucleotides 5′ of the start of the NGG PAM. For the gRNA 8/15 pair, the predicted overhang sequence is:

(SEQ ID NO: 16317)
TCATCCACGTTCACCTTGCCCCACAGGGCAGTAACGGCAGACTTCTC.

Insertion sequences were classified according to the absence of matching overhang sequence, the presence of a partial matching sequence (at least one 9-mer in common), or a the presence off a full matching sequence (complete overhang sequence contained within the insertion sequence). Fisher's exact test was used to determine statistical significance of differences in the proportion of sequences with partial or full overhang matches generated with Cas9 D10A nickase or Cas9 N863A nickase. Segments of the overhang sequence overrepresented in insertions were identified by extracting all 4-mer sequences present in each insertion sequence and identifying the positions in the overhang where the 4-mer sequence exactly matched. 4-mers found multiple times within the overhang sequence were excluded from downstream analyses. Statistical significance of the distribution of 4-mer positions resulting from Cas9 D10A nickase- or Cas9 N863A nickase-induced lesions was tested using a permutation test (permTS function from the “perm” R package with default settings).

### Example 5

### Assessment of Gene Targeting in Hematopoietic Stem Cells

[1290] Transplantation of autologous CD34⁺ hematopoietic stem cells (HSCs, also known as hematopoietic stem/progenitor cells or HSPCs) genetically modified to correct the Sickle Cell Disease (SCD) mutation in the human β-hemoglobin gene (HBB) would prevent deformability (sickling) after deoxygenation in the erythrocyte progeny of corrected HSCs which could ameliorate symptoms associated with SCD. Genome editing with the CRISPR/Cas9 platform precisely alters endogenous gene targets by creating an indel at the targeted cut site that can lead to knock down of gene expression at the edited locus. In this Example, genome editing in the human K562 bone marrow erythroleukemia cell line, which serve as a proxy for HSCs and which can be predictive of genome editing in HSCs, were electroporated with Cas9 mRNA and gRNA HBB-8 and gRNA HBB-15 to induce gene editing at the human HBB locus.

[1291] K562 cells were grown in RPMI media (Life Technologies) containing 10% fetal bovine serum (FBS). S. pyogenes Cas9 mRNA and gRNA HBB-15 and gRNA HBB-8 were prepared by in vitro transcription using linearized plasmid DNA as templates and the Ambion mMessage mMachine® T7 Ultra Transcription kit (Life Technologies) according to the manufacturer's instructions. In this embodiment, both the Cas9 and gRNA were in vitro transcribed using a T7 polymerase. For example, a 5′ ARCA cap was added to both RNA species simultaneous to transcription while a polyA tail was added after transcription to the 3′ end of the RNA species by an E. coli polyA polymerase. Capped and tailed gRNA HBB-8 and gRNA HBB-15 were complexed at room temperature with S. pyogenes H-NLS-Cas9 protein at a molar ratio of ˜25:1 (gRNA: Cas9 protein) in a total of 30 μg RNP. Briefly, three million K562 cells were suspended in 100 μL electroporation buffer and transferred to the RNP solution (13 μL). In addition, K562 cells were electroporated with S. pyogenes Cas9 mRNA and each of the gRNA HBB-8 and gRNA HBB-15. For the mRNA/gRNA electroporation, 10 μg of gRNA HBB-8 (or 10 μg of HBB gRNA HBB-15) were mixed with 10 μg of Cas9 mRNA. Four million K562 cells were suspended in 100 μL electroporation buffer and then transferred to the mRNA/gRNA solution (13 μL). K562 cells mixed with either RNP or RNA were electroporated. At 48 hours after electroporation, K562 cells were enumerated by trypan blue exclusion and were determined to have >88% viability in the electroporated cell populations. Genomic DNA was extracted from K562 cells 48 hours after electroporation and HBB locus-specific PCR reactions were performed.

[1292] In order to detect indels at the HBB locus, T7E1 assays were performed on HBB locus-specific PCR products that were amplified from genomic DNA samples from electroporated K562 cells and the percentage of indels detected at the HBB locus was calculated (FIG. 19).

[1293] Co-delivery of 10 μg RNP which contains wild-type S. pyogenes Cas9 protein with HBB gRNA 8 or HBB gRNA 15 resulted in 26.8% and 16.1% indels, respectively, at the HBB locus in gDNA from K562 cells (molar ratio protein:gRNA 24:1). Co-delivery of Cas9 mRNA with gRNA HBB-8 or HBB-15 led to 66.9% and 29.5% indels at the HBB locus in gDNA from K562 cells (10 μg of each RNA/4 million cells). This example shows that delivery of Cas9 mRNA/gRNA and Cas9 RNPs leads to editing of the HBB locus in a relevant bone marrow derived hematopoietic cell line (K562 cells). Clinically, transplantation of autologous HSCs in which the HBB locus has been edited to correct the genetic mutation that causes red blood cell sickling could be used to ameliorate symptoms of SCD.

### Example 6

### Contribution of Different Pairs of gRNA Molecules for Gene Correction

[1294] The CRISPR/Cas9 system was used to target the human HBB gene in the region of the sickle cell anemia-causing mutation.

[1295] Three different gRNA pairs were evaluated to examine how different pairs of gRNA molecules allocated at different distances can affect the frequency of different DNA repair outcomes in the presence of dual-nicks, in which the nicks are placed on opposite strands and leave either 3′ or 5′ overhangs of varying lengths. DNA repair outcomes including, e.g., indel mutations resulting from non-homologous end-joining (NHEJ), homology-dependent repair (HDR) using a donor as a template, and HDR using the closely related HBD gene as an endogenous template, were characterized. The frequencies of these various repair outcomes under different conditions offer insights into the mechanism of DNA repair and how it is impacted by the nature of the DNA break, the length of the overhangs, and/or the nature of the sequence exposed.

[1296] In this study different gRNA molecules for the HBB region that surround the nucleotides encoding the amino acid that is most commonly mutated in sickle cell disease were tested in 293T cells with wild type Cas9. The gRNA molecules that induced similar high rates of NHEJ and had PAMs facing in opposite orientations were selected to test as pairs with Cas9 D10A and Cas9 N863A nickases.

[1297] As shown in FIG. 20, the gRNA pairs 8/15 (“8gRNA”/“15gRNA” pair), 8/19 (“8gRNA”/“19gRNA” pair) and 8/21 (“8gRNA”/“21gRNA” pair) were selected. (“8gRNA”/“15gRNA” pair). The targeting domain sequences for “8gRNA” and “15gRNA” are described above. “19gRNA” has the targeting domain sequence of CCUGUGGGGCAAGGUGAACG (SEQ ID NO: 419) and “21gRNA” has the targeting domain sequence of UGAAGUUGGUGGUGAGGCCC (SEQ ID NO: 431). These pairs of gRNA molecules used in combination with the mutant Cas9 D10A generated a 5′ overhang of 47 bp, 37 bp and 61 bp, respectively; in combination with the mutant Cas9 N863A generated a 3′ overhang of 47 bp, 37 bp and 61 bp, respectively.

[1298] In this Example, U2OS cells were electroporated with 200 ng of each gRNA and 750 ng of plasmid that encodes mutant Cas9 (D10A or N863A). Cells were collected 6 days after electroporation and genomic DNA was extracted. PCR amplification of the HBB locus was performed and the product was subcloned into a Topo Blunt Vector. For each condition in each experiment, 96 colonies were sequenced with Sanger sequencing. In the experiments assessing HDR efficacy, cells were electroporated with 2.5 μg of single stranded oligo or double stranded oligo in addition to the gRNA and the Cas9-encoding plasmid.

[1299] As shown in FIG. 21, the total percentages of all editing events detected by Sanger sequencing of the HBB locus were similar using the different pairs of gRNA molecules (Cas9 N863A was less active compared to Cas9 D10A). FIG. 21 indicates that the overall editing frequencies for both Cas9 D10A and Cas9 N863A nickases were independent of overhang length and composition.

[1300] FIG. 22 shows that for the Cas9 N863A nickase, a majority of the gene editing events were insertions with all three pairs of gRNA molecules (Cas9 N863A had a higher level of insertions compared to Cas9 D10A). FIG. 22 indicates that the Cas9 N863 nickase yielded a higher frequency of insertions, which was independent of overhang length and composition, while the Cas9 D10A insertions were overall less frequent, they appeared to be sensitive to overhang length and composition.

[1301] As shown in FIG. 23, the Cas9 N863A-induced insertions are mostly duplications of the overhang regions, as opposed to the overhangs coming from the Cas9 D10A, i.e., with specific gRNA pair combinations, the Cas9 N863 nickase had a higher percentage of insertions derived from the overhang sequence than the Cas9 D10A nickase. Moreover, the lengths of the insertions between Cas9 D10A and Cas9 N863A were substantially different with longer insertions being observed using the Cas9 N863A nickase (FIG. 24).

[1302] As shown in FIG. 25, in the case of the Cas9 D10A nickase, which leaves a 5′ protruding end, the lesion was mostly repaired through a mechanism of gene conversion with a significantly higher rate compared to the Cas9 N863A nickase. Not all gRNA pairs tested in this example behaved similarly. The 8/15 gRNA pair was mostly repaired using a gene conversion mechanism, while the 8/19 and 8/21 pairs yielded a significant reduction of gene conversion frequency. Specifically, the 8/21 pair displayed a 3 fold reduction in gene conversion efficiency. These data suggest that either the length of the overhang or the nature of the sequence exposed, or both, could affect the DNA repair machinery. These data indicate that gene conversion was depending on the type of Cas nickase and on the sequence and length of overhangs.

[1303] To test the effect that different pairs had on the engagement of HDR, a donor template was provided as a single-strand oligo or as a double stranded (ds) DNA donor. In both cases the length of the donor is approximately 170 bp with 60 bp of homology outside the nicks and with 8 mismatches (FIG. 26). As shown in FIG. 26, all three pairs resulted in similar HDR frequencies, i.e., the frequency of gene correction from exogenous donor was comparable despite of the length of overhangs. Neither Cas9 D10A nor Cas9 N863A induced gene correction from exogenous donor was dependent on overhang length and composition. FIG. 26 indicates that gene correction from exogenous donor was more efficient with the Cas9 D10A nuclease compared to the Cas9 N863A nuclease.

### Example 7

### Contact Between S. pyogenes Cas9 Ribonucleoprotein Complexed to gRNAs Targeting the HBB Genetic Locus Supports Gene Editing in Adult Human Hematopoietic Stem Cells

[1304] Transplantation of autologous CD34⁺ hematopoietic stem cells (HSCs) collected from patients affected with hemoglobinopathies (e.g., sickle cell disease [SCD], β-thalessemia), that have been genetically modified with a lentivirus vector that expresses non-sickling β-hemoglobin gene (HBB) has been shown to restore expression of functional adult hemoglobin (HbA) thus preventing the formation of sickle hemoglobin (HbSS), in erythroid cells derived from transduced CD34⁺ cells and ameliorating clinical symptoms in affected patients (Press Release from Bluebird Bio, Jun. 13, 2015, “bluebird bio Reports New Beta-thalassemia major and Severe Sickle Cell Disease Data from HGB-205 study at EHA”). However, delivery of a transgene encoding a non-sickling β-hemoglobin does not correct the causative mutation or prevent expression of the mutant (e.g., sickling) form of HBB. Furthermore, lentivirus vector transduction of CD34⁺ cells can lead to the occurrence of multiple transgene integration sites per cell, and the long-term effects of multiple transgene integration sites is currently undetermined.

[1305] In contrast, genome editing with the CRISPR/Cas9 platform precisely alters endogenous gene targets by creating an insertion or deletion (indel) at the cut site that can lead to gene disruption at the edited locus. Co-delivery of two gRNAs each targeting regions proximal to the single nucleotide polymorphism (SNP) that encodes HbSS (e.g., GAG→GTG, which results in a change in the amino acid residue from glutamic acid to valine) co-delivered with a Cas9 D10A nickase supports a low level of homology directed repair (HDR) in human cell lines (e.g., gene conversion using a region of homology in the HBD locus as DNA repair template).

[1306] In this Example, genome editing in adult human mobilized peripheral blood CD34⁺ HSCs after co-delivery of Cas9 D10A nickase with two gRNAs targeting the HBB locus was evaluated. The edited CD34⁺ cells were then differentiated into myeloid and erythroid cells to determine the hematopoietic activity of the HSCs. Gene editing at the HBB locus was evaluated by T7E1 analysis and DNA sequencing. Expression of HBB protein was also analyzed in erythroid progeny.

[1307] Human CD34⁺ HSCs cells from mobilized peripheral blood (AllCells®) were thawed into StemSpan Serum-Free Expansion Medium (SFEMTM, StemCell Technologies) containing 300 ng/mL each of human stem cell factor (SCF) and flt-3 ligand (FL), 100 ng/mL thrombopoietin (TPO), and 60 ng/mL of IL-6, and 10 μM PGE2 (Cayman Biochemicals; all other supplements were from PeproTech® unless otherwise indicated). Cells were grown for 3 days in a humidified incubator and 5% CO₂ 20% O₂. On day 3 (morning), media was replaced with fresh Stemspan-SFEM™ supplemented with human SCF, TPO, FL and PGE2. In the afternoon of day 3, 2.5 million CD34⁺ cells per sample were suspended in electroporation buffer.

[1308] The gRNA was generated by in vitro transcription using a T7 polymerase. A 5′ ARCA cap was added to the RNA simultaneous to transcription while a polyA tail was added after transcription to the 3′ end of the RNA species by an E. coli polyA polymerase.

[1309] After the gRNAs were in vitro transcribed and tailed, the quality and quantity of gRNAs were evaluated with the Bioanalyzer (Nanochip®) to determine RNA concentration and by Differential Scanning Fluorimetry (DSF) assay, a thermal shift assay that quantifies the change in the thermal denaturation temperature of Cas9 protein with and without complexing to gRNA. In DSF assays, the Cas9 protein was mixed with gRNA and allowed to form complexes for 10 minutes. Cas9 protein:gRNA were mixed at a molar ration of 1:1, and the DSF assay performed as a measure of Cas9 stability and as an indirect measure of gRNA quality, since a 1:1 ratio of gRNA:Cas9 should support a thermal shift if the gRNA is of good quality (FIG. 27A).

[1310] For half of the samples, in vitro transcribed capped and tailed guide (g)RNAs HBB-8 and HBB-15 were added at a 2:1 molar ratio to 12.5 μg D10A Cas9 ribonucleoprotein (RNP) (5 μg RNP per million cells) to 2.5 million cells. “HBB-8” has the targeting domain sequence of GUAACGGCAGACUUCUCCUC (SEQ ID NO:388), and “HBB-15” has the targeting domain sequence of AAGGUGAACGUGGAUGAAGU (SEQ ID NO:387). D10A protein and gRNAs RNP complexes were transferred to 2.5 million adult CD34⁺ cells in electroporation buffer. The RNP/cell mixture was transferred to an electroporation cartridge, and the cells then electroporated (“Program 2” and “Program 3”).

[1311] For the second portion of CD34⁺ cell samples, equal amounts (5 μg or 10 μg [2XgRNA] each) of in vitro transcribed capped and tailed guide (g)RNAs HBB-8 and HBB-15 were added to 10 μg of in vitro transcribed Cas9 D10A mRNA. The mRNA:gRNA:cell mixture was transferred to an electroporation cartridge and electroporated using Program 2 (P2).

[1312] For all samples, the cells were collected from the cartridge and placed at 37° C. for 20 minutes (recovery period). Then, the cells were either transferred to pre-warmed cytokine supplemented Stemspan-SFEM™ media and placed at 30° C. for 2 hours (cold shock samples) or placed directly into 37° C. For the cold shocked samples, the cells were transferred to the 37° C. incubator after the 2-hour incubation period at 30° C. At 24, 48, and 72 hours after electroporation, the CD34⁺ cells were counted by trypan blue exclusion (cell survival) and divided into 3 portions for the following analyses: a) flow cytometry analysis for assessment of viability by co-staining with 7-Aminoactinomycin-D (7-AAD) and allophycocyanin (APC)-conjugated Annexin-V antibody (eBioscience); b) flow cytometry analysis for maintenance of HSC phenotype (after co-staining with phycoerythrin (PE)-conjugated anti-human CD34 antibody (BD Biosciences) and APC-conjugated CD133 (Miltenyi Biotech; c) hematopoietic colony forming cell (CFC) analysis by plating 800 cells in semi-solid methylcellulose based Methocult medium (StemCell Technologies H4435) that supports differentiation of erythroid and myeloid blood cell colonies from HSCs and serves as a surrogate assay to evaluate HSC multipotency and differentiation potential ex vivo; d) genomic DNA analysis for detection of editing at the HBB locus. Genomic DNA was extracted from the HSCs at 48 and 72 hours after electroporation and HBB locus-specific PCR reactions were performed. The purified PCR products were analyzed for insertions/deletions (indels) in T7E1 assays and by DNA sequencing of individual clones (PCR product was transformed and sub-cloned into TOPO-vector, individual colonies picked, and plasmid DNA containing individual PCR products were sequenced).

[1313] Western blot analysis of cell lysates extracted from the Cas9/gRNA electroporated CD34₊ cells indicated the presence of Cas9 protein at 72 hours after electroporation of CD34⁺ cells that received Cas9 RNP and gRNA pair. Very low levels of Cas9 protein were detected in the lysates of cells that were electroporated with Cas9 mRNA (FIG. 27B).

[1314] Electroporated CD34⁺ cells maintained a stem cell phenotype (e.g., co-expression of CD34 and CD133) and viability (e.g., 75% AnnexinV⁻7 AAD⁻) as determined by flow cytometry analysis (FIG. 28A). The absolute number of viable CD34⁺ cells was maintained across most samples over a 72-hour culture period after electroporation (FIG. 28B). In addition, gene edited CD34⁺ cells maintained ex vivo hematopoietic activity and multipotency as indicated by their ability to give rise to erythroid (e.g., CFU-E or CFU-GEMM) and myeloid (e.g., CFU-G, -M or -GM) (FIG. 28C).

[1315] Gene editing at the HBB locus was then evaluated at 72 hours after electroporation of D10A mRNA or RNP co-delivered with two gRNAs (HBB-8 and HBB-15). Briefly, genomic (g)DNA was isolated from electroporated CD34⁺ cells at 72 hours after electroporation, and PCR amplification of a ˜607 bp fragment of the HBB locus (which captured both of the individual genomic locations that were targeted by the two gRNAs HBB-8 and HBB-15) was performed. After cleanup of the HBB PCR product with AMPURE beads, insertions/deletions (indels) at the targeted genomic location were evaluated by T7E1 assay and by DNA sequencing. For the CD34⁺ cells electroporated with D10A mRNA and HBB targeting gRNA pair, no indels were detected (Table 10). In contrast to the negative results obtained after delivery of D10A mRNA, ˜30-60% indels were detected by T7E1 and sequencing analysis of CD34⁺ cells that were electroporated with D10A RNP with the HBB targeting gRNA pair (Table 10, FIG. 29A-29C). The cells that were cultured for 2 hours at 30° C. (after a 20-minute recovery period at 37° C.) exhibited 57% editing as determined by DNA sequencing. In addition, gene conversion (e.g., HBD genomic sequence used as a template copy for DNA repair of the disrupted HBB locus) was detected in the gDNA from CD34⁺ cells that were ‘cold shocked’ (30° C. incubation) at a frequency of 3% relative to the total gene editing events (FIG. 29C).

TABLE 10
Summary of gene editing results in adult CD34⁺ cells 72
hours after co-delivery of D10A Cas9 and HBB specific gRNA pair.

| | | μg | μg | Temperature | % | % |
|---|---|---|---|---|---|---|
| D10A | μg | HBB-8 | HBB-15 | of 2-hour | indels | indels (se- |
| source | D10A | gRNA | gRNA | recovery | (T7E1) | quencing) |
| mRNA | 10 | 5 | 5 | 37° C. | 0 | ND |
| mRNA | 10 | 5 | 5 | 30° C. | 0 | ND |
| mRNA | 10 | 10 | 10 | 37° C. | 0 | ND |
| RNP | 12.5 | 3.3 | 3.3 | 37° C. | 45 | 30 |
| RNP | 12.5 | 3.3 | 3.3 | 30° C. | 39 | 57 |
| RNP* | 12.5 | 3.3 | 3.3 | 37° C. | 39 | 39 |

*Alternate electroporation program (P3).

[1316] To determine whether targeted disruption of the HBB locus induced changes in expression of b-hemoglobin protein, CFU-E colonies were picked, dissociated, fixed, permeabilized and stained with PE-conjugated mouse anti-human β-hemoglobin antibody (Santa Cruz Biotechnology®). The erythroid progeny of HBB gene edited cells exhibited a 7-to-10 fold reduction in β-hemoglobin expression compared to the CFU-Es differentiated from untreated control CD34⁺ cells (FIG. 30). These data show that the progeny of gene edited cells retain erythroid differentiation potential and that gene editing events detected in the parental CD34⁺ cells result in reduced protein expression in erythroid progeny.

### Example 8

### Contact Between S. pyogenes D10A Cas9 Nickase Ribonucleoprotein Complexed to gRNAs Targeting the HBB Genetic Locus Supports Gene Editing in Fresh Umbilical Cord Blood Derived Human CD34+ Hematopoietic Stem Cells

[1317] In this Example, genome editing in freshly collected umbilical cord blood (CB) CD34⁺ HSCs after co-delivery of D10A Cas9 nickase with two gRNAs targeting the HBB locus was evaluated. The edited CB CD34⁺ cells were then differentiated into myeloid and erythroid cells to determine the hematopoietic activity of the HSCs. Targeted disruption of the HBB locus was evaluated by T7E1 analysis and DNA sequencing.

[1318] Human CD34⁺ HSCs cells were isolated from freshly obtained human umbilical cord blood by ficoll gradient density centrifugation followed by MACS® (antibody conjugated immunomagnetic bead sorting) with mouse anti-human CD34⁺ immunomagnetic beads using the human CD34 cell enrichment kit and LS magnetic columns from Miltenyi Biotech. The cells were plated into StemSpan Serum-Free Expansion Medium (SFEM™, StemCell Technologies) containing 100 ng/mL each of human stem cell factor (SCF) and flt-3 ligand (FL), 20 ng/mL each of thrombopoietin (TPO) and IL-6, and 10 μM PGE2 (Cayman Biochemicals; all other supplements were from Peprotech unless otherwise indicated). Cells were grown for 3 days in a humidified incubator and 5% CO₂ 20% O₂. On day 3 (morning), media was replaced with fresh Stemspan-SFEM™ supplemented with human SCF, TPO, FL and PGE2. In the afternoon of day 3, 2.5 million CD34⁺ cells per sample were suspended in electroporation buffer.

[1319] The gRNAs were generated by in vitro transcription using a T7 polymerase. A 5′ ARCA cap was added to the RNA simultaneous to transcription while a polyA tail was added after transcription to the 3′ end of the RNA species by an E. coli polyA polymerase. After the gRNAs were in vitro transcribed and tailed, the quality and quantity of gRNAs were evaluated with the Bioanalyzer (Nanochip) to determine RNA concentration and by DSF assay performed as a measure of D10A Cas9 nickase RNP stability and as an indirect measure of gRNA quality.

[1320] In vitro transcribed capped and tailed guide gRNAs HBB-8 and HBB-15 were added at a 2:1 molar ratio (total gRNA:Cas9 protein) to 12.5 μg D10A nickase ribonucleoprotein (RNP) (5 μg RNP per million cells) to each of two samples each containing 2.5 million CB CD34⁺ cells. A third CB CD34⁺ cell aliquot was mixed with 25 μg D10A nickase RNP and HBB gRNAs (total gRNA: D10A ratio at 2:1). For each experimental sample, the D10A RNP/cell mixture was transferred to an electroporation cartridge, and the cells then electroporated using Program 2.

[1321] For all samples, the cells were collected from the cartridge and placed at 37° C. for 20 minutes (recovery period). For the CB CD34⁺ HSCs that were contacted with 12.5 μg D10A nickase RNP, one sample was transferred to pre-warmed cytokine supplemented Stemspan-SFEM™ media and placed at 30° C. for 2 hours (cold shock samples) or placed directly into the same media at 37° C. For the cold shocked samples, the cells were transferred to the 37° C. incubator after the 2-hour incubation period at 30° C. At 24, 48, and 72 hours after electroporation, the CB CD34⁺ HSCs were counted by trypan blue exclusion (cell survival) and divided into 3 portions for the following analyses: a) flow cytometry analysis for assessment of viability by co-staining with 7-Aminoactinomycin-D (7-AAD) and allophycocyanin (APC)-conjugated Annexin-V antibody (eBioscience); b) flow cytometry analysis for maintenance of HSC phenotype (after co-staining with phycoerythrin (PE)-conjugated anti-human CD34 antibody (BD Biosciences) and APC-conjugated CD133 (Miltenyi Biotech; c) hematopoietic colony forming cell (CFC) analysis by plating 800 CB CD34⁺ HSCs in semi-solid methylcellulose based Methocult medium (StemCell Technologies H4435) that supports differentiation of erythroid and myeloid blood cell colonies from HSCs and serves as a surrogate assay to evaluate HSC multipotency and differentiation potential ex vivo; d) genomic DNA analysis for detection of editing at the HBB locus. Genomic DNA was extracted from the HSCs at 48 and 72 hours after electroporation and HBB locus-specific PCR reactions were performed. The purified PCR products were analyzed for insertions/deletions (indels) in T7E1 assays and by DNA sequencing of individual clones (PCR product was transformed and subcloned into TOPO-vector, individual colonies picked, and plasmid DNA containing individual PCR products were sequenced).

[1322] Electroporated CB CD34⁺ cells maintained a stem cell phenotype (e.g., co-expression of CD34 and CD133, ˜90% CD34⁺CD133⁺) and viability (e.g., 91% AnnexinV⁻7 AAD⁻) as determined by flow cytometry analysis (FIG. 31A). The absolute number of viable CD34⁺ cells was maintained across most samples over a 72-hour culture period after electroporation. In addition, gene edited CD34⁺ cells maintained ex vivo hematopoietic activity and multipotency as indicated by their ability to give rise to erythroid (e.g., CFU-E or CFU-GEMM) and myeloid (e.g., CFU-G, -M, or -GM) (FIG. 31B).

[1323] Gene editing at the HBB locus was then evaluated at 72 hours after electroporation of D10A nickase RNP co-delivered with 2 gRNAs (HBB-8 and HBB-15). Briefly, gDNA was isolated from electroporated CD34⁺ cells at 72 hours after electroporation, and PCR amplification of a ˜607 bp fragment of the HBB locus (which captures both of the individual genomic locations that were targeted by gRNAs HBB-8 and HBB-15) was performed. After cleanup of the HBB PCR product with AMPURE beads, insertions/deletions (indels) at the targeted genomic location were evaluated by T7E1 assay and by DNA sequencing. For the CD34⁺ cells electroporated with 5 μg per million cells of D10A nickase RNP and HBB-specific gRNA pair, ˜20% indels were detected by T7E1 analysis (Table 11). In contrast to adult CD34⁺ cells, a 2-hour incubation at 30° C. did not alter the level of gene editing as determined by either T7E1 analysis or DNA sequence analysis. In addition, doubling the D10A nickase RNP/gRNA concentration to 10 μg RNP per million cells nearly doubled the gene editing at the HBB locus to 57%, as determined by DNA sequencing analysis (Table 11, FIGS. 32A-32C). Stratification of DNA repair events through DNA sequencing analysis revealed that ˜50-70% of the sequence reads contained small insertions, ˜20-40% contained large deletions, and ˜8% showed evidence of HBB/HBD gene conversion events in the targeted HBB genomic location (FIG. 32C).

TABLE 11
Summary of gene editing results in CB CD34⁺ cells 72 hours
after co-delivery of D10A nickase RNP and HBB-specific gRNA pair.

| Total | μg | | | | | | |
|---|---|---|---|---|---|---|---|
| μg | D10A | μg | μg | Temperature | | | |
| D10A | RNP/1E6 | HBB-8 | HBB-15 | of 2-hour | Electroporation | % indels | % indels |
| RNP | cells | gRNA | gRNA | recovery | Program | (T7E1) | (sequencing) |
| 12.5 | 5 | 3.3 | 3.3 | 37° C. | 2 | 20 | 23 |
| 12.5 | 5 | 3.3 | 3.3 | 30° C. | 2 | 27 | 20 |
| 25 | 10 | 6.6 | 6.6 | 37° C. | 2 | 36 | 51 |

[1324] In contrast to adult CD34⁺ cells, CB CD34⁺ cells are fetal in origin and therefore the progeny of CB CD34⁺ cells express fetal hemoglobin (HbF) which contains γ-hemoglobin instead of β-hemoglobin. Given the lack of β-hemoglobin by CB eyrthroblasts, disruption of the HBB locus in this model system will not impact expression of hemoglobin protein. CB CD34⁺ cells are used as a model system for evaluation of gene editing in HSCs, since these umbilical cord blood derived CD34⁺ cells are more readily available for research use and reconstitute immune-deficient mouse xenografts more efficiently compared to adult CD34⁺ cells.

[1325] To determine whether gene edited cells retained their erythroid differentiation potential, the edited CD34⁺ cells were induced to differentiate into erythroblasts. Briefly, CD34⁺ cells were co-cultured with human plasma, holotransferrin, insulin, hydrocortisone, and cytokines (erythropoietin, SCF, IL3), for 20 days in which the latter 4 growth factors were added at different stages of differentiation to direct erythroid specification program. The cells were then evaluated by flow cytometry for the acquisition of erythroid phenotypic characteristics including: co-expression of the transferrin receptor (CD71) and Glycophorin A (CD235); expression of HbF, and enucleation (as indicated by the absence dsDNA detected by the dsDNA dye DRAQ5) and loss of CD45 expression. By day 18 of differentiation, the erythroblast progeny of edited CD34⁺ cells possessed this red blood cell phenotype (FIGS. 33A-33C). These data, along with the CFC data shown in FIGS. 31A-31B show that the gene editing does not negatively impact the differentiation potential of CD34⁺ cells.

[1326] In summary, the data in this Example indicate: 1) electroporation of fresh CB CD34⁺ HSCs with D10A nickase and paired capped/tailed gRNAs does not impact cell viability, proliferation potential, or multipotency; and 2) contact between CB CD34⁺ HSCs and 10 μg D10A RNP (per million cells) supports >50% gene editing with HDR events (8% gene conversion events of total).

### Example 9

### Contact Between S. pyogenes Wild-Type Cas9 RNP or D10A Nickase RNP Complexed to gRNAs Targeting the HBB Genetic Locus Supports Up to 60% Gene Editing in Human Cord Blood Hematopoietic Stem Cells

[1327] In this Example, umbilical cord blood (CB) CD34⁺ HSCs were contacted with S. pyogenes wild-type Cas9 RNP, N863A nickase RNP, or D10A nickase RNP complexed with 2 gRNAs targeting the HBB locus. The percentage of gene editing and type of editing event (e.g., HDR (e.g., gene conversion) or NHEJ) were evaluated to determine the optimal Cas9 activity (e.g., type of cut, e.g., double-strand break from wild-type Cas9 or off-set nicks on opposite DNA strands by nickases) for gene editing in HSCs that would favor HDR (e.g., gene conversion) over NHEJ (e.g., ends of the DNA left exposed after the cut, e.g., blunt ends left by wild-type Cas9 cut, 5′ overhang left by D10A nickase cut or 3′ overhang left by N863A nickase cut). Other optimizations included: 1) removal of endotoxin from Cas9 protein preparation to reduce toxicity of Cas9 protein; 2) use of 10 μg RNP per million CD34⁺ cells to increase gene editing (shown to double gene editing in fresh CB CD34⁺ cells compared to 5 μg RNP, as indicated in Example 8); 3) testing of human CD34⁺ cells that were isolated from cord blood (CB), cryopreserved, and confirm that gene editing was not impacted by cryopreservation (compared to freshly isolated HSCs, described in Example 8); and 4) evaluate Cas9 RNP levels in CD34⁺ cells over time to understand Cas9 RNP stability in HSCs.

[1328] Human CD34⁺ HSCs cells were isolated from freshly obtained human umbilical cord blood by ficoll gradient density centrifugation followed by MACS sorting with mouse anti-human CD34⁺ immunomagnetic beads. CD34₊ cells were cryopreserved, thawed at a later date, and plated into StemSpan Serum-Free Expansion Medium (SFEM™, StemCell Technologies) containing 100 ng/mL each of human stem cell factor (SCF) and flt-3 ligand (FL), 20 ng/mL each of thrombopoietin (TPO) and IL-6, and 10 μM PGE2 (Cayman Biochemicals; all other supplements were from PeproTech® unless otherwise indicated). Cells were grown for 3 days in a humidified incubator and 5% CO₂ 20% O₂. On day 3 (morning), media was replaced with fresh Stemspan-SFEM™ supplemented with human SCF, TPO, FL and PGE2. In the afternoon of day 3, 2.2 million CD34⁺ cells per sample were suspended in electroporation buffer.

[1329] The gRNAs were generated by in vitro transcription using a T7 polymerase. A 5′ ARCA cap was added to the RNA simultaneous to transcription while a polyA tail was added after transcription to the 3′ end of the RNA species by an E. coli polyA polymerase. After the gRNAs were in vitro transcribed and tailed, the quality and quantity of gRNAs were evaluated with the Bioanalyzer (Nanochip) to determine RNA concentration and by DSF assay performed as a measure of D10A Cas9 nickase RNP stability and as an indirect measure of gRNA quality.

[1330] In vitro transcribed capped and tailed guide gRNAs HBB-8 and HBB-15 were added at a 2:1 molar ratio (total gRNA:Cas9 protein) to 10 μg RNP per million cells. The RNPs tested include the following: wild-type (WT) Cas9, endotoxin-free WT Cas9, N863A nickase, D10A nickase. For each experimental sample, the D10A RNP/cell mixture was transferred to the electroporation cartridge, and the cells then electroporated using Program 2 (P2).

[1331] For all samples, the cells were collected from the cartridge and placed at 37° C. for 20 minutes (recovery period). For the CB CD34⁺ cells that were contacted with 10 μg D10A nickase RNP (per million cells), one sample was transferred to pre-warmed cytokine supplemented Stemspan-SFEM™ media and placed at 30° C. for 2 hours (cold shock recovery) or placed directly into the same media at 37° C. For the cold shocked samples, the cells were transferred to the 37° C. incubator after the 2-hour incubation period at 30° C. At 24, 48, and 72 hours after electroporation, the CB CD34⁺ cells were counted by trypan blue exclusion (cell survival) and divided into 3 portions for the following analyses: a) flow cytometry analysis for assessment of viability by co-staining with 7-Aminoactinomycin-D (7-AAD) and allophycocyanin (APC)-conjugated Annexin-V antibody (ebioscience); b) flow cytometry analysis for maintenance of HSC phenotype (after co-staining with phycoerythrin (PE)-conjugated anti-human CD34 antibody (BD Biosciences) and APC-conjugated CD133 (Miltenyi Biotech; c) hematopoietic colony forming cell (CFC) analysis by plating 800 cells in semi-solid methylcellulose based Methocult medium (StemCell Technologies H4435) that supports differentiation of erythroid and myeloid blood cell colonies from HSCs and serves as a surrogate assay to evaluate HSC multipotency and differentiation potential ex vivo; d) genomic DNA analysis for detection of editing at the HBB locus; and e) Western blot analysis of protein to evaluate the stability of Cas9 RNP in CD34⁺ HSCs. gDNA was extracted from the HSCs at 48 and 72 hours after electroporation and HBB locus-specific PCR reactions were performed. The purified PCR products were analyzed for insertions/deletions (indels) in T7E1 assays and by DNA sequencing of individual clones (PCR product was transformed and subcloned into TOPO-vector, individual colonies picked, and plasmid DNA containing individual PCR products were sequenced).

[1332] Electroporated CB CD34⁺ cells maintained a stem cell phenotype (e.g., co-expression of CD34 and CD133, >90% CD34⁺CD133⁺) and as determined by flow cytometry analysis. The absolute number of viable CD34⁺ cells was maintained across most samples over a 72-hour culture period after electroporation (FIG. 34A). Gene edited CD34⁺ cells maintained ex vivo hematopoietic activity and multipotency as indicated by their ability to give rise to erythroid (e.g., CFU-E, or CFU-GEMM) and myeloid (e.g., CFU-G, -M, or -GM) (FIG. 34B).

[1333] Gene editing at the HBB locus was then evaluated at 72 hours after electroporation of WT Cas9, N863A, or D10A nickases co-delivered with 2 gRNAs (HBB-8 and HBB-15). Briefly, gDNA was isolated from electroporated CD34⁺ cells at 72 hours after electroporation, and PCR amplification of a ˜607 bp fragment of the HBB locus (which captured both of the individual genomic locations that were targeted by gRNAs HBB-8 and HBB-15) was performed. After cleanup of the HBB PCR product with AMPURE beads, insertions/deletions (indels) at the targeted genomic location were evaluated by T7E1 assay and by DNA sequencing. For the CD34⁺ cells electroporated with WT Cas9 and endotoxin-free WT Cas9 the percentages of indels detected by T7E1 analysis at 72 hours was 59% and 51%, respectively (FIG. 35A), which correlated with the indels detected by DNA sequencing (Table 12). CD34⁺ cells electroporation with N863A nickase and HBB-specific gRNA pair, had only 1% indels detected by T7E1 analysis. CD34⁺ HSCs electroporated with D10A nickase with and without cold shock supported gene editing at percentages of 39% and 48% indels detected by T7E1 analysis, respectively. In order to confirm that this low level of editing observed in CD34⁺ HSCs contacted with N863A nickase, was not due to the lack of N863A RNP contacting the cells, western blot analysis was performed (FIG. 35B).

[1334] Cas9 protein was present in all electroporated samples (e.g., cells that received WT Cas9, D10A nickase, and N863A nickase). For these samples, Cas9 protein was detected at 24 and 48 hours after electroporation, suggesting that the lack of N863A activity in the CD34⁺ HSCs was not due to the lack of protein.

[1335] Gene editing in CD34⁺ HSCs that contacted WT Cas9, endotoxin-free Cas9, and D10A nickase was 54-60%, based on DNA sequencing analysis (Table 12, FIG. 36A). Stratification of DNA repair events through DNA sequencing analysis revealed that >90% of the gene editing events were deletions in CD34⁺ HSCs that contacted WT Cas9 and endotoxin-free WT Cas9 (insertions or combination of insertion and deletion comprised the remaining 3-6% of editing events) (FIG. 36A). In contrast, gDNA from CD34⁺ HSCs that contacted D10A nickases had 3% HDR (e.g., gene conversion), up to 75% insertions, and up to 22% deletions (FIG. 36B).

[1336] In summary, the data in this Example indicate: 1) endotoxin removal does not negatively impact Cas9 functionality or CD34⁺ HSC cell viability, proliferation potential, or multipotency; 2) use of 10 μg D10A RNP supports 60% gene editing in CD34⁺ HSCs with HDR events (e.g., gene conversion); and 3) after contacting CD34⁺ HSCs, WT Cas9 and nickase RNPs are detected for up to 48 hours, but is not detectable thereafter.

TABLE 12
Summary of gene editing results in CB CD34⁺ cells 72 hours
after co-delivery of wild-type Cas9, N863A nickase, D10A nickase RNP
and HBB-specific gRNA pair.

| | Total μg | Temperature | Electro- | | |
|---|---|---|---|---|---|
| | RNP/1E6 | of 2-hour | poration | % indels | % indels |
| Cas9 | cells | recovery | Program | (T7E1) | (sequencing) |
| WT | 10 | 37° C. | 2 | 59 | 56 |
| Endo- | 10 | 37° C. | 2 | 51 | 60 |
| Free | | | | | |
| WT | | | | | |
| N863A | 10 | 37° C. | 2 | 1 | ND |
| D10A | 10 | 37° C. | 2 | 39 | 60 |
| D10A | 10 | 30° C. | 2 | 48 | 54 |

### Example 10

### Gene Conversion Modulation

[1337] The CRISPR/Cas9 system was used to target the human HBB gene in the region of the sickle cell anemia-causing mutation.

[1338] The nature of the targeted break affects the frequency of different DNA repair outcomes. Blunt double-strand breaks, single-strand nicks, and dual-nicks in which the nicks are placed on opposite strands and leave either 3′ or 5′ overhangs of varying lengths, were introduced by utilizing the wild type Cas9 nuclease, as well as two different Cas9 nickases. Several different DNA repair outcomes including, e.g., indel mutations resulting from non-homologous end-joining (NHEJ) and homology-dependent repair (HDR) using the closely related HBD gene as an endogenous template, were characterized. The frequency of these various repair outcomes under different conditions offers insight into the mechanisms of DNA repair and how it is impacted by the nature of the DNA break. Here, we examined how different repair pathways affect the frequency of gene conversion (HDR from the closely related HBD gene as an endogenous template). Specifically, we evaluated the effect of down-regulation of the alternative NHEJ (alt-NHEJ) and HDR pathways on the gene conversion rate in the presence of dual-nicks.

[1339] In this study, different gRNAs targeting the HBB region that surround the nucleotides encoding the amino acid most commonly mutated in sickle cell disease were tested in 293T cells with wild type Cas9. The gRNAs that induced similar high rates of NHEJ and had PAMs facing in opposite orientations were selected to test as pairs with Cas9 D10A (which would generate a 5′ overhang) and Cas9 N863A nickases (which would generate a 3′ overhang).

[1340] As a first example of enzymes that modulate gene conversion frequency, we selected the polymerase Pol theta, which is a central player in the alt-NHEJ pathway. In this example, U2OS cells were electroporated with 200 ng of each gRNA (8 and 15), 750 ng of plasmid that encodes wild type Cas9 or mutant Cas9 (D10A or N863A) and 30 pmol of scrambled siRNA as a negative control or 30 pmol of siRNA against Pol Theta. Cells were collected 6 days after electroporation and genomic DNA was extracted. PCR amplification of the HBB locus was performed and subcloned into a Topo Blunt Vector. For each condition in each experiment 96 colonies were sequenced with Sanger sequencing.

[1341] As shown in FIG. 37, down regulation of Pol theta in the context of the D10A Cas9 does not affect the gene editing profile. In contrast, Pol theta down-regulation in the context of the N863A Cas9 nuclease leads to a strong reduction of the insertion frequency and an increase in the gene conversion rate. These data suggest that the 3′ protruding ends generated by the N863A Cas9 nuclease are substrates for processing by Pol Theta, resulting in a high accumulation of insertions. Upon down-regulation of Pol Theta, the 3′ protruding DNA ends are available for engaging the gene conversion pathway (FIG. 37).

[1342] Next, we dissected the genetic requirements of the gene conversion pathway in the context of different Cas9 nucleases (FIG. 38), using BRCA2 and RAD51—central players of canonical HR—as an example. U2OS cell were electroporated with 200 ng of each gRNA (8 and 15), 750 ng of plasmid that encodes wild type Cas9 or mutant Cas9 (D10A or N863A) and 30 pmol of scrambled siRNA as a negative control or 30 pmol of siRNA against BRCA2 or RAD51. As shown in FIG. 38, the majority of the gene conversion events are mediated by BRCA2 and RAD51. These data are consistent with the notion that gene conversion using the HBD gene as a donor in cis is an event mediated by canonical HR.

[1343] In summary, different DNA ends engage different repair pathways. FIG. 39 depicts a model of the genetic requirements of the gene conversion pathway in the context of different Cas9 nucleases (wild type, D10A or N863A). Use of a Cas9 nickase with two gRNAs generates either 3′ or 5′ overhangs, which are most likely not suitable substrates to be repaired by canonical NHEJ, but can be repaired by alternative pathways. The 3′ end is predominantly a substrate for repair by the Alt NHEJ. The key player in the pathway is Pol Theta, which refills the ends, thereby generating insertions deriving from the overhangs.

[1344] The 5′ protruding end is mostly repaired through gene conversion, in which the HBB gene is repaired using the homologous HBD locus as a template. This pathway is dependent on BRCA2 and RAD51, which suggests the action of the canonical HR pathway.

[1345] In conclusion, these data support a therapeutic approach in which correction of the sickle-cell mutation is efficiently mediated through HDR from the endogenous HBD gene, and it elucidates strategies of how to promote or suppress this event.

### Example 11

### CRISPR/Cas9 RNP Supports Gene Editing of T Lymphocytes Derived from a Sickle Cell Disease Patient Ex Vivo

[1346] To determine whether Cas9 RNP mediated gene editing could correct the sickle cell disease (SCD) mutation, peripheral blood mononuclear cells (MNCs) from a SCD patient were obtained (Conversant Bio). To expand the T lymphocyte fraction from bulk MNCs, MNCs were thawed into T cell culture media (X-VIVO 15 supplemented with human AB serum, N-acetylcysteine, Glutamax (L-glutamine), and human cytokines (IL-2, IL-7, IL-15)). The T lymphocyte fraction was activated with CD3/CD28 immunomagnetic beads. By day 3 of MNC culture in T cell media, the cell population was 72% CD3⁺. After 7 days, a population comprising >98% CD3⁺ T lymphocytes was obtained, most of which were also CD4⁺ (FIG. 40A). Genomic DNA (gDNA) was extracted from the CD3⁺ T lymphocytes and sequenced to confirm the presence of the SCD mutation.

[1347] After confirmation of the sickle mutation in the CD3⁺ T lymphocytes, gRNA was designed to target the SCD mutation (HBB-8-sickle gRNA targeting sequence: GUAACGGCAGACUUCUCCAC (SEQ ID NO:16318), underline indicates SCD mutation). The gRNA was in vitro transcribed from a DNA PCR product template. The HBB-8-sickle was modified to contain a 5′ ARCA cap and a 3′ polyA tail. Another gRNA HBB-15 (SEQ ID NO:387) was also in vitro transcribed and was modified to contain a 5′ ARCA cap and a 3′ polyA tail. The gRNAs were complexed to S. pyogenes Cas9 D10A nickase protein for RNP production.

[1348] To evaluate Cas RNP editing in SCD patient cells, 2×10⁶ cells were electroporated with Cas9 D10A nickase RNP, in which the nickase was complexed to 2 different gRNA pairs to target the sequence specific to the HBB gDNA of SCD patients (HBB-8-sickle and HBB-15). Dual D10A nickase RNP (10 μg per 1×10⁶ cells) was co-electroporated with a single strand oligonucleotide donor (SSODN, 250 pmoles per 1×10⁶ cells). After electroporation, cells were plated onto T cell media with or without CD3/CD28 immunomagnetic beads to determine whether restimulation of T cells after electroporation would improve survival and viability of the gene-edited cells. Re-plating the edited cells into culture with CD3/CD28 beads for cell reactivation improved the total viability of the electroporated cells in comparison to cells plated in T cell media without CD3/CD28 beads (% viability determined by flow cytometry analysis after staining with apoptosis stains 7-AAD and Annexin V; FIG. 40B). Gene editing was evaluated by DNA sequencing. The gRNA combination HBB-8-sickle and HBB-15 (each complexed to Cas9 D10A nickase) supported 48% total editing, as detected by T7E1 endonuclease assay analysis of the HBB PCR product (FIG. 40C). Ten percent higher editing was detected in gDNA from the T lymphocytes that were reactivated with CD3/CD28 beads after electroporation, compared to cells cultured in T cell medial alone. These data show that Cas9 RNP targeting the SCD mutation supports gene editing in SCD patient cells.

### INCORPORATION BY REFERENCE

[1349] All publications, patents, and patent applications mentioned herein are hereby incorporated by reference in their entirety as if each individual publication, patent or patent application was specifically and individually indicated to be incorporated by reference. In case of conflict, the present application, including any definitions herein, will control.

### EQUIVALENTS

[1350] Those skilled in the art will recognize, or be able to ascertain using no more than routine experimentation, many equivalents to the specific embodiments of the invention described herein. Such equivalents are intended to be encompassed by the following claims.

### REFERENCES

[1351] Anders et al. Nature 513(7519):569-573 (2014)
[1352] Bae et al. Bioinformatics 30(10):1473-1475 (2014)
[1353] Caldecott Nat. Rev. Genet. 9(8):619-631 (2008)
[1354] Cong et al. Science 399(6121):819-823 (2013)
[1355] Chylinski et al. RNA Biol. 10(5):726-737 (2013)
[1356] Deveau et al. J. Bacteriol. 190(4): 1390-1400 (2008)
[1357] Esvelt et al. Nature 472(7344): 499-503 (2011)
[1358] Friedland et al. Genome Biol. 16:257 (2015)
[1359] Fu et al. Nat. Biotechnol. 32:279-284 (2014)
[1360] Haft et al. PLoS Computational Biology 1(6): e60 (2005)
[1361] Heigwer et al. Nat. Methods 11(2):122-3 (2014)
[1362] Horvath et al. Science 327(5962): 167-170 (2010)
[1363] Hsu et al. Nat. Biotechnol. 31(9): 827-32 (2013)
[1364] Jinek et al. Science 337(6096):816-821 (2012)
[1365] Jinek et al. Science 343(6176):1247997 (2014)
[1366] Kleinstiver et al. Nat. Biotechnol. 33(12):1293-8 (2015)
[1367] Lee et al. Nano Lett. 12(12):6322-6327 (2012)
[1368] Li Cell. Res. 18(1):85-98 (2008)
[1369] Makarova et al. Nature Review Microbiology 9:467-477 (2011)
[1370] Mali et al. Science 399(6121): 823-826 (2013)
[1371] Marteijn et al. Nat. Rev. Mol. Cell. Biol. 15(7):465-481 (2014)
[1372] Mayle et al. Science 349: 742-47 (2015)
[1373] Neelsen and Lopes Nat. Rev. Mol. Cell. Biol. 16: 207-20 (2015)
[1374] Nishimasu et al. Cell 156(5):935-949 (2014)
[1375] Ran et al. Cell 154(6): 1380-1389 (2013)
[1376] Saleh-Gohari et al. Mol. Cell. Biol. 25: 7158-69 (2005)
[1377] Schlacher et al. Cancer Cell 22: 106-16 (2012)
[1378] Sternberg et al. Nature 507(7490):62-67 (2014)
[1379] Wang et al. Cell 153(4):910-918 (2013)
[1380] Xiao A. et al. Bioinformatics 30 (8):1180-1182 (2014)
[1381] Zellweger et al. J. Cell. Biol. 205: 563-79 (2015)
[1382] Zhou et al., Nucleic Acids Res. 42(3):e19 (2014)

The application's sequence listing, which the Patent Office published only in electronic form, follows.

SEQUENCE LISTING (16324 sequences)

SEQ ID NO: 1 - protein, 1344 aa, Streptococcus mutans
KKPYSIGLDIGTNSVGWAVVTDDYKVPAKKMKVLGNTDKSHIEKNLLGALLFDSGNTAEDRRLKRTARRRYTRRRNRILYLQEIFSEEMGKVDDSFFHRLEDSFLVTEDKRGERHPIFGNLEEEVKYHENFPTIYHLRQYLADNPEKVDLRLVYLALAHIIKFRGHFLIEGKFDTRNNDVQRLFQEFLAVYDNTFENSSLQEQNVQVEEILTDKISKSAKKDRVLKLFPNEKSNGRFAEFLKLIVGNQADFKKHFELEEKAPLQFSKDTYEEELEVLLAQIGDNYAELFLSAKKLYDSILLSGILTVTDVGTKAPLSASMIQRYNEHQMDLAQLKQFIRQKLSDKYNEVFSDVSKDGYAGYIDGKTNQEAFYKYLKGLLNKIEGSGYFLDKIEREDFLRKQRTFDNGSIPHQIHLQEMRAIIRRQAEFYPFLADNQDRIEKLLTFRIPYYVGPLARGKSDFAWLSRKSADKITPWNFDEIVDKESSAEAFINRMTNYDLYLPNQKVLPKHSLLYEKFTVYNELTKVKYKTEQGKTAFFDANMKQEIFDGVFKVYRKVTKDKLMDFLEKEFDEFRIVDLTGLDKENKVFNASYGTYHDLCKILDKDFLDNSKNEKILEDIVLTLTLFEDREMIRKRLENYSDLLTKEQVKKLERRHYTGWGRLSAELIHGIRNKESRKTILDYLIDDGNSNRNFMQLINDDALSFKEEIAKAQVIGETDNLNQVVSDIAGSPAIKKGILQSLKIVDELVKIMGHQPENIVVEMARENQFTNQGRRNSQQRLKGLTDSIKEFGSQILKEHPVENSQLQNDRLFLYYLQNGRDMYTGEELDIDYLSQYDIDHIIPQAFIKDNSIDNRVLTSSKENRGKSDDVPSKDVVRKMKSYWSKLLSAKLITQRKFDNLTKAERGGLTDDDKAGFIKRQLVETRQITKHVARILDERFNTETDENNKKIRQVKIVTLKSNLVSNFRKEFELYKVREINDYHHAHDAYLNAVIGKALLGVYPQLEPEFVYGDYPHFHGHKENKATAKKFFYSNIMNFFKKDDVRTDKNGEIIWKKDEHISNIKKVLSYPQVNIVKKVEEQTGGFSKESILPKGNSDKLIPRKTKKFYWDTKKYGGFDSPIVAYSILVIADIEKGKSKKLKTVKALVGVTIMEKMTFERDPVAFLERKGYRNVQEENIIKLPKYSLFKLENGRKRLLASARELQKGNEIVLPNHLGTLLYHAKNIHKVDEPKHLDYVDKHKDEFKELLDVVSNFSKKYTLAEGNLEKIKELYAQNNGEDLKELASSFINLLTFTAIGAPATFKFFDKNIDRKRYTSTTEILNATLIHQSITGLYETRIDLNKLGGD

SEQ ID NO: 2 - protein, 1367 aa, Streptococcus pyogenes
DKKYSIGLDIGTNSVGWAVITDEYKVPSKKFKVLGNTDRHSIKKNLIGALLFDSGETAEATRLKRTARRRYTRRKNRICYLQEIFSNEMAKVDDSFFHRLEESFLVEEDKKHERHPIFGNIVDEVAYHEKYPTIYHLRKKLVDSTDKADLRLIYLALAHMIKFRGHFLIEGDLNPDNSDVDKLFIQLVQTYNQLFEENPINASGVDAKAILSARLSKSRRLENLIAQLPGEKKNGLFGNLIALSLGLTPNFKSNFDLAEDAKLQLSKDTYDDDLDNLLAQIGDQYADLFLAAKNLSDAILLSDILRVNTEITKAPLSASMIKRYDEHHQDLTLLKALVRQQLPEKYKEIFFDQSKNGYAGYIDGGASQEEFYKFIKPILEKMDGTEELLVKLNREDLLRKQRTFDNGSIPHQIHLGELHAILRRQEDFYPFLKDNREKIEKILTFRIPYYVGPLARGNSRFAWMTRKSEETITPWNFEEVVDKGASAQSFIERMTNFDKNLPNEKVLPKHSLLYEYFTVYNELTKVKYVTEGMRKPAFLSGEQKKAIVDLLFKTNRKVTVKQLKEDYFKKIECFDSVEISGVEDRFNASLGTYHDLLKIIKDKDFLDNEENEDILEDIVLTLTLFEDREMIEERLKTYAHLFDDKVMKQLKRRRYTGWGRLSRKLINGIRDKQSGKTILDFLKSDGFANRNFMQLIHDDSLTFKEDIQKAQVSGQGDSLHEHIANLAGSPAIKKGILQTVKVVDELVKVMGRHKPENIVIEMARENQTTQKGQKNSRERMKRIEEGIKELGSQILKEHPVENTQLQNEKLYLYYLQNGRDMYVDQELDINRLSDYDVDHIVPQSFLKDDSIDNKVLTRSDKNRGKSDNVPSEEVVKKMKNYWRQLLNAKLITQRKFDNLTKAERGGLSELDKAGFIKRQLVETRQITKHVAQILDSRMNTKYDENDKLIREVKVITLKSKLVSDFRKDFQFYKVREINNYHHAHDAYLNAVVGTALIKKYPKLESEFVYGDYKVYDVRKMIAKSEQEIGKATAKYFFYSNIMNFFKTEITLANGEIRKRPLIETNGETGEIVWDKGRDFATVRKVLSMPQVNIVKKTEVQTGGFSKESILPKRNSDKLIARKKDWDPKKYGGFDSPTVAYSVLVVAKVEKGKSKKLKSVKELLGITIMERSSFEKNPIDFLEAKGYKEVKKDLIIKLPKYSLFELENGRKRMLASAGELQKGNELALPSKYVNFLYLASHYEKLKGSPEDNEQKQLFVEQHKHYLDEIIEQISEFSKRVILADANLDKVLSAYNKHRDKPIREQAENIIHLFTLTNLGAPAAFKYFDTTIDRKRYTSTKEVLDATLIHQSITGLYETRIDLSQLGGD

SEQ ID NO: 3 - protein, 1387 aa, Streptococcus thermophilus
TKPYSIGLDIGTNSVGWAVTTDNYKVPSKKMKVLGNTSKKYIKKNLLGVLLFDSGITAEGRRLKRTARRRYTRRRNRILYLQEIFSTEMATLDDAFFQRLDDSFLVPDDKRDSKYPIFGNLVEEKAYHDEFPTIYHLRKYLADSTKKADLRLVYLALAHMIKYRGHFLIEGEFNSKNNDIQKNFQDFLDTYNAIFESDLSLENSKQLEEIVKDKISKLEKKDRILKLFPGEKNSGIFSEFLKLIVGNQADFRKCFNLDEKASLHFSKESYDEDLETLLGYIGDDYSDVFLKAKKLYDAILLSGFLTVTDNETEAPLSSAMIKRYNEHKEDLALLKEYIRNISLKTYNEVFKDDTKNGYAGYIDGKTNQEDFYVYLKKLLAEFEGADYFLEKIDREDFLRKQRTFDNGSIPYQIHLQEMRAILDKQAKFYPFLAKNKERIEKILTFRIPYYVGPLARGNSDFAWSIRKRNEKITPWNFEDVIDKESSAEAFINRMTSFDLYLPEEKVLPKHSLLYETFNVYNELTKVRFIAESMRDYQFLDSKQKKDIVRLYFKDKRKVTDKDIIEYLHAIYGYDGIELKGIEKQFNSSLSTYHDLLNIINDKEFLDDSSNEAIIEEIIHTLTIFEDREMIKQRLSKFENIFDKSVLKKLSRRHYTGWGKLSAKLINGIRDEKSGNTILDYLIDDGISNRNFMQLIHDDALSFKKKIQKAQIIGDEDKGNIKEVVKSLPGSPAIKKGILQSIKIVDELVKVMGGRKPESIVVEMARENQYTNQGKSNSQQRLKRLEKSLKELGSKILKENIPAKLSKIDNNALQNDRLYLYYLQNGKDMYTGDDLDIDRLSNYDIDHIIPQAFLKDNSIDNKVLVSSASNRGKSDDVPSLEVVKKRKTFWYQLLKSKLISQRKFDNLTKAERGGLSPEDKAGFIQRQLVETRQITKHVARLLDEKFNNKKDENNRAVRTVKIITLKSTLVSQFRKDFELYKVREINDFHHAHDAYLNAVVASALLKKYPKLEPEFVYGDYPKYNSFRERKSATEKVYFYSNIMNIFKKSISLADGRVIERPLIEVNEETGESVWNKESDLATVRRVLSYPQVNVVKKVEEQNHGLDRGKPKGLFNANLSSKPKPNSNENLVGAKEYLDPKKYGGYAGISNSFTVLVKGTIEKGAKKKITNVLEFQGISILDRINYRKDKLNFLLEKGYKDIELIIELPKYSLFELSDGSRRMLASILSTNNKRGEIHKGNQIFLSQKFVKLLYHAKRISNTINENHRKYVENHKKEFEELFYYILEFNENYVGAKKNGKLLNSAFQSWQNHSIDELCSSFIGPTGSERKGLFELTSRGSAADFEFLGVKIPRYRDYTPSSLLKDATLIHQSVTGLYETRIDLAKLGEG

SEQ ID NO: 4 - protein, 1333 aa, Listeria innocua
KKPYTIGLDIGTNSVGWAVLTDQYDLVKRKMKIAGDSEKKQIKKNFWGVRLFDEGQTAADRRMARTARRRIERRRNRISYLQGIFAEEMSKTDANFFCRLSDSFYVDNEKRNSRHPFFATIEEEVEYHKNYPTIYHLREELVNSSEKADLRLVYLALAHIIKYRGNFLIEGALDTQNTSVDGIYKQFIQTYNQVFASGIEDGSLKKLEDNKDVAKILVEKVTRKEKLERILKLYPGEKSAGMFAQFISLIVGSKGNFQKPFDLIEKSDIECAKDSYEEDLESLLALIGDEYAELFVAAKNAYSAVVLSSIITVAETETNAKLSASMIERFDTHEEDLGELKAFIKLHLPKHYEEIFSNTEKHGYAGYIDGKTKQADFYKYMKMTLENIEGADYFIAKIEKENFLRKQRTFDNGAIPHQLHLEELEAILHQQAKYYPFLKENYDKIKSLVTFRIPYFVGPLANGQSEFAWLTRKADGEIRPWNIEEKVDFGKSAVDFIEKMTNKDTYLPKENVLPKHSLCYQKYLVYNELTKVRYINDQGKTSYFSGQEKEQIFNDLFKQKRKVKKKDLELFLRNMSHVESPTIEGLEDSFNSSYSTYHDLLKVGIKQEILDNPVNTEMLENIVKILTVFEDKRMIKEQLQQFSDVLDGVVLKKLERRHYTGWGRLSAKLLMGIRDKQSHLTILDYLMNDDGLNRNLMQLINDSNLSFKSIIEKEQVTTADKDIQSIVADLAGSPAIKKGILQSLKIVDELVSVMGYPPQTIVVEMARENQTTGKGKNNSRPRYKSLEKAIKEFGSQILKEHPTDNQELRNNRLYLYYLQNGKDMYTGQDLDIHNLSNYDIDHIVPQSFITDNSIDNLVLTSSAGNREKGDDVPPLEIVRKRKVFWEKLYQGNLMSKRKFDYLTKAERGGLTEADKARFIHRQLVETRQITKNVANILHQRFNYEKDDHGNTMKQVRIVTLKSALVSQFRKQFQLYKVRDVNDYHHAHDAYLNGVVANTLLKVYPQLEPEFVYGDYHQFDWFKANKATAKKQFYTNIMLFFAQKDRIIDENGEILWDKKYLDTVKKVMSYRQMNIVKKTEIQKGEFSKATIKPKGNSSKLIPRKTNWDPMKYGGLDSPNMAYAVVIEYAKGKNKLVFEKKIIRVTIMERKAFEKDEKAFLEEQGYRQPKVLAKLPKYTLYECEEGRRRMLASANEAQKGNQQVLPNHLVTLLHHAANCEVSDGKSLDYIESNREMFAELLAHVSEFAKRYTLAEANLNKINQLFEQNKEGDIKAIAQSFVDLMAFNAMGAPASFKFFETTIERKRYNNLKELLNSTIIYQSITGLYESRKRLDD

SEQ ID NO: 5 - RNA, 96 nt, Artificial Sequence
  Synthetic oligonucleotide
  misc_feature (1)..(20): a, c, u, g, unknown or other
nnnnnnnnnnnnnnnnnnnnguuuuagagcuagaaauagcaaguuaaaauaaggcuaguccguuaucaacuugaaaaaguggcaccgagucggugc

SEQ ID NO: 6 - protein, 1082 aa, Neisseria meningitidis
MAAFKPNSINYILGLDIGIASVGWAMVEIDEEENPIRLIDLGVRVFERAEVPKTGDSLAMARRLARSVRRLTRRRAHRLLRTRRLLKREGVLQAANFDENGLIKSLPNTPWQLRAAALDRKLTPLEWSAVLLHLIKHRGYLSQRKNEGETADKELGALLKGVAGNAHALQTGDFRTPAELALNKFEKESGHIRNQRSDYSHTFSRKDLQAELILLFEKQKEFGNPHVSGGLKEGIETLLMTQRPALSGDAVQKMLGHCTFEPAEPKAAKNTYTAERFIWLTKLNNLRILEQGSERPLTDTERATLMDEPYRKSKLTYAQARKLLGLEDTAFFKGLRYGKDNAEASTLMEMKAYHAISRALEKEGLKDKKSPLNLSPELQDEIGTAFSLFKTDEDITGRLKDRIQPEILEALLKHISFDKFVQISLKALRRIVPLMEQGKRYDEACAEIYGDHYGKKNTEEKIYLPPIPADEIRNPVVLRALSQARKVINGVVRRYGSPARIHIETAREVGKSFKDRKEIEKRQEENRKDREKAAAKFREYFPNFVGEPKSKDILKLRLYEQQHGKCLYSGKEINLGRLNEKGYVEIDHALPFSRTWDDSFNNKVLVLGSENQNKGNQTPYEYFNGKDNSREWQEFKARVETSRFPRSKKQRILLQKFDEDGFKERNLNDTRYVNRFLCQFVADRMRLTGKGKKRVFASNGQITNLLRGFWGLRKVRAENDRHHALDAVVVACSTVAMQQKITRFVRYKEMNAFDGKTIDKETGEVLHQKTHFPQPWEFFAQEVMIRVFGKPDGKPEFEEADTLEKLRTLLAEKLSSRPEAVHEYVTPLFVSRAPNRKMSGQGHMETVKSAKRLDEGVSVLRVPLTQLKLKDLEKMVNREREPKLYEALKARLEAHKDDPAKAFAEPFYKYDKAGNRTQQVKAVRVEQVQKTGVWVRNHNGIADNATMVRVDVFEKGDKYYLVPIYSWQVAKGILPDRAVVQGKDEEDWQLIDDSFNFKFSLHPNDLVEVITKKARMFGYFASCHRGTGNINIRIHDLDHKIGKNGILEGIGVKTALSFQKYQIDELGKEIRPCRLKKRPPVR

SEQ ID NO: 7 - protein, 1368 aa, Streptococcus pyogenes [sequence omitted]

SEQ ID NO: 8 - protein, 12 aa, Artificial Sequence
  Synthetic peptide
  VARIANT (2)..(2): Xaa is Ile or Val or Met or Leu or Thr
  VARIANT (4)..(4): Xaa is Thr or Ile or Val or Ser or Asn or Tyr or Glu or Leu
  VARIANT (5)..(5): Xaa is Asn or Ser or Gly or Ala or Asp or Thr or Arg or Met or Phe
  VARIANT (6)..(6): Xaa is Ser or Tyr or Asn or Phe
  VARIANT (7)..(7): Xaa is Val or Ile or Leu or Cys or Thr or Phe
  VARIANT (9)..(9): Xaa is Trp or Phe or Val or Tyr or Ser or Leu
  VARIANT (10)..(10): Xaa is Ala or Ser or Cys or Val or Gly
  VARIANT (11)..(11): Xaa is Val or Ile or Leu or Ala or Met or His
  VARIANT (12)..(12): Any amino acid or absent
DXGXXXXGXXXX

SEQ ID NO: 9 - protein, 12 aa, Artificial Sequence
  Synthetic peptide
  VARIANT (2)..(2): Xaa is Ile or Val or Met or Leu or Thr
  VARIANT (4)..(4): Xaa is Thr or Ile or Val or Ser or Asn or Tyr or Glu or Leu
  VARIANT (5)..(5): Xaa is Asn or Ser or Gly or Ala or Asp or Thr or Arg or Met or Phe
  VARIANT (7)..(7): Xaa is Val or Ile or Leu or Cys or Thr or Phe
  VARIANT (9)..(9): Xaa is Trp or Phe or Val or Tyr or Ser or Leu
  VARIANT (10)..(10): Xaa is Ala or Ser or Cys or Val or Gly
  VARIANT (11)..(11): Xaa is Val or Ile or Leu or Ala or Met or His
  VARIANT (12)..(12): Any amino acid or absent
DXGXXSXGXXXX

SEQ ID NO: 10 - protein, 12 aa, Artificial Sequence
  Synthetic peptide
  VARIANT (4)..(4): Xaa is Thr or Ile or Val or Ser or Asn or Tyr or Glu or Leu
  VARIANT (5)..(5): Xaa is Asn or Ser or Gly or Ala or Asp or Thr or Arg or Met or Phe
  VARIANT (11)..(11): Xaa is Val or Ile or Leu or Ala or Met or His
  VARIANT (12)..(12): Any amino acid or absent
DIGXXSVGWAXX

SEQ ID NO: 11 - protein, 12 aa, Artificial Sequence
  Synthetic peptide
  MOD_RES (12)..(12): Any non-polar alkyl amino acid or a hydroxyl amino acid
DIGTNSVGWAVX

SEQ ID NO: 12 - protein, 8 aa, Artificial Sequence
  Synthetic peptide
  VARIANT (2)..(2): Xaa is Val or His
  VARIANT (3)..(3): Xaa is Ile or Leu or Val
  VARIANT (5)..(5): Xaa is Met or Thr
IXXEXARE

SEQ ID NO: 13 - protein, 8 aa, Artificial Sequence
  Synthetic peptide
  VARIANT (3)..(3): Xaa is Ile or Leu or Val
IVXEMARE

SEQ ID NO: 14 - protein, 8 aa, Artificial Sequence
  Synthetic peptide
  VARIANT (4)..(4): Xaa is His or Leu
  VARIANT (7)..(7): Xaa is Arg or Val
  VARIANT (8)..(8): Xaa is Glu or Val
HHAXDAXX

SEQ ID NO: 15 - protein, 8 aa, Artificial Sequence
  Synthetic peptide
HHAHDAYL

SEQ ID NO: 16 - protein, 30 aa, Artificial Sequence
  Synthetic polypeptide
  VARIANT (2)..(2): Xaa is Lys or Pro
  VARIANT (4)..(4): Xaa is Val or Leu or Ile or Phe
  VARIANT (5)..(5): Xaa is Gly or Ala or Ser
  VARIANT (6)..(6): Xaa is Leu or Ile or Val or Phe
  MOD_RES (7)..(26): Any amino acid and this region may encompass 5-20 residues wherein some positions may be absent
  VARIANT (29)..(29): Xaa is Asp or Glu or Asn or Gln
KXYXXXXXXXXXXXXXXXXXXXXXXXTDXY

SEQ ID NO: 17 - protein, 27 aa, Artificial Sequence
  Synthetic peptide
  VARIANT (1)..(1): Xaa is Asp or Glu or Gln or Asn
  VARIANT (2)..(2): Xaa is Leu or Ile or Arg or Gln or Val or Met or Lys
  VARIANT (3)..(3): Xaa is Asp or Glu
  VARIANT (5)..(5): Xaa is Ile or Val or Thr or Ala or Leu
  VARIANT (6)..(6): Xaa is Val or Tyr or Ile or Leu or Phe or Trp
  VARIANT (8)..(8): Xaa is Gln or His or Arg or Lys or Tyr or Ile or Leu or Phe or Trp
  VARIANT (9)..(9): Xaa is Ser or Ala or Asp or Thr or Lys
  VARIANT (10)..(10): Xaa is Phe or Leu or Val or Lys or Tyr or Met or Ile or Arg or Ala or Glu or Asp or Gln
  VARIANT (11)..(11): Xaa is Leu or Arg or Thr or Ile or Val or Ser or Cys or Tyr or Lys or Phe or Gly
  VARIANT (12)..(12): Xaa is Lys or Gln or Tyr or Thr or Phe or Leu or Trp or Met or Ala or Glu or Gly or Ser
  VARIANT (13)..(13): Xaa is Asp or Ser or Asn or Arg or Leu or Thr
  VARIANT (14)..(14): Xaa is Asp or Asn or Ser
  VARIANT (15)..(15): Xaa is Ser or Ala or Thr or Gly or Arg
  VARIANT (16)..(16): Xaa is Ile or Leu or Phe or Ser or Arg or Tyr or Gln or Trp or Asp or Lys or His
  VARIANT (17)..(17): Xaa is Asp or Ser or Ile or Asn or Glu or Ala or His or Phe or Leu or Gln or Met or Gly or Tyr or Val
  VARIANT (19)..(19): Xaa is Lys or Leu or Arg or Met or Thr or Phe
  VARIANT (20)..(20): Xaa is Val or Leu or Ile or Ala or Thr
  VARIANT (21)..(21): Xaa is Leu or Ile or Val or Ala
  VARIANT (22)..(22): Xaa is Thr or Val or Cys or Glu or Ser or Ala
  VARIANT (23)..(23): Xaa is Arg or Phe or Thr or Trp or Glu or Leu or Asn or Cys or Lys or Val or Ser or Gln or Ile or Tyr or His or Ala
  VARIANT (24)..(24): Xaa is Ser or Pro or Arg or Lys or Asn or Ala or His or Gln or Gly or Leu
  VARIANT (25)..(25): Xaa is Asp or Gly or Thr or Asn or Ser or Lys or Ala or Ile or Glu or Leu or Gln or Arg or Tyr
  VARIANT (26)..(26): Xaa is Lys or Val or Ala or Glu or Tyr or Ile or Cys or Leu or Ser or Thr or Gly or Lys or Met or Asp or Phe
XXXHXXPXXXXXXXXXXNXXXXXXXXN

SEQ ID NO: 18 - protein, 27 aa, Artificial Sequence
  Synthetic peptide
  VARIANT (1)..(1): Xaa is Asp or Glu
  VARIANT (2)..(2): Xaa is Leu or Ile or Arg or Gln or Val or Met or Lys
  VARIANT (3)..(3): Xaa is Asp or Glu
  VARIANT (5)..(5): Xaa is Ile or Val or Thr or Ala or Leu
  VARIANT (6)..(6): Xaa is Val or Tyr or Ile or Leu or Phe or Trp
  VARIANT (8)..(8): Xaa is Gln or His or Arg or Lys or Tyr or Ile or Leu or Phe or Trp
  VARIANT (10)..(10): Xaa is Phe or Leu or Val or Lys or Tyr or Met or Ile or Arg or Ala or Glu or Asp or Gln
  VARIANT (11)..(11): Xaa is Leu or Arg or Thr or Ile or Val or Ser or Cys or Tyr or Lys or Phe or Gly
  VARIANT (12)..(12): Xaa is Lys or Gln or Tyr or Thr or Phe or Leu or Trp or Met or Ala or Glu or Gly or Ser
  VARIANT (16)..(16): Xaa is Ile or Leu or Phe or Ser or Arg or Tyr or Gln or Trp or Asp or Lys or His
  VARIANT (17)..(17): Xaa is Asp or Ser or Ile or Asn or Glu or Ala or His or Phe or Leu or Gln or Met or Gly or Tyr or Val
  VARIANT (22)..(22): Xaa is Thr or Val or Cys or Glu or Ser or Ala
  VARIANT (23)..(23): Xaa is Arg or Phe or Thr or Trp or Glu or Leu or Asn or Cys or Lys or Val or Ser or Gln or Ile or Tyr or His or Ala
  VARIANT (24)..(24): Xaa is Ser or Pro or Arg or Lys or Asn or Ala or His or Gln or Gly or Leu
  VARIANT (25)..(25): Xaa is Asp or Gly or Thr or Asn or Ser or Lys or Ala or Ile or Glu or Leu or Gln or Arg or Tyr
  VARIANT (26)..(26): Xaa is Lys or Val or Ala or Glu or Tyr or Ile or Cys or Leu or Ser or Thr or Gly or Lys Met or Asp or Phe
XXXHXXPXSXXXDDSXXNKVLXXXXXN

SEQ ID NO: 19 - protein, 27 aa, Artificial Sequence
  Synthetic peptide
  VARIANT (1)..(1): Xaa is Asp or Glu
  VARIANT (3)..(3): Xaa is Asp or Glu
  VARIANT (8)..(8): Xaa is Gln or His or Arg or Lys or Tyr or Ile or Leu or Trp
  VARIANT (10)..(10): Xaa is Phe or Leu or Val or Lys or Tyr or Met or Ile or Arg or Ala or Glu or Asp or Gln
  VARIANT (11)..(11): Xaa is Leu or Arg or Thr or Ile or Val or Ser or Cys or Tyr or Lys or Phe or Gly
  VARIANT (12)..(12): Xaa is Lys or Gln or Tyr or Thr or Phe or Leu or Trp or Met or Ala or Glu or Gly or Ser
  VARIANT (16)..(16): Xaa is Ile or Leu or Phe or Ser or Arg or Tyr or Gln or Trp or Asp or Lys or His
  VARIANT (17)..(17): Xaa is Asp or Ser or Ile or Asn or Glu or Ala or His or Phe or Leu or Gln or Met or Gly or Tyr or Val
  VARIANT (23)..(23): Xaa is Arg or Phe or Thr or Trp or Glu or Leu or Asn or Cys or Lys or Val or Ser or Gln or Ile or Tyr or His or Ala
  VARIANT (24)..(24): Xaa is Ser or Pro or Arg or Lys or Asn or Ala or His or Gln or Gly or Leu
  VARIANT (25)..(25): Xaa is Asp or Gly or Thr or Asn or Ser or Lys or Ala or Ile or Glu or Leu or Gln or Arg or Tyr
  VARIANT (26)..(26): Xaa is Lys or Val or Ala or Glu or Tyr or Ile or Cys or Leu or Ser or Thr or Gly or Lys or Met or Asp or Phe
XVXHIVPXSXXXDDSXXNKVLTXXXXN

SEQ ID NO: 20 - protein, 27 aa, Artificial Sequence
  Synthetic peptide
  VARIANT (2)..(2): Xaa is Ile or Val
  VARIANT (6)..(6): Xaa is Ile or Val
  VARIANT (9)..(9): Xaa is Ala or Ser
  VARIANT (11)..(11): Xaa is Ile or Leu
  VARIANT (12)..(12): Xaa is Lys or Thr
  VARIANT (14)..(14): Xaa is Asp or Asn
  VARIANT (19)..(19): Xaa is Arg or Lys or Leu
  VARIANT (22)..(22): Xaa is Thr or Val
  VARIANT (23)..(23): Xaa is Ser or Arg
  VARIANT (25)..(25): Xaa is Lys or Asp or Ala
  VARIANT (26)..(26): Xaa is Glu or Lys or Gly or Asn
DXDHIXPQXFXXDXSIDNXVLXXSXXN

SEQ ID NO: 21 - protein, 73 aa, Artificial Sequence
  Synthetic polypeptide
  VARIANT (8)..(8): Xaa is Lys or Arg
  VARIANT (12)..(12): Xaa is Val or Thr
  VARIANT (13)..(13): Xaa is Gly or Asp
  VARIANT (14)..(14): Xaa is Glu or Gln or Asp
  VARIANT (15)..(15): Xaa is Glu or Asp
  VARIANT (19)..(19): Xaa is Asp or Asn or His
  VARIANT (20)..(20): Xaa is Tyr or Arg or Asn
  VARIANT (23)..(23): Xaa is Gln or Asp or Asn
  MOD_RES (25)..(64): Any amino acid and this region may encompass 15-40 residues wherein some positions may be absent
  VARIANT (67)..(67): Xaa is Gly or Glu
  VARIANT (69)..(69): Xaa is Ser or Gly
  VARIANT (71)..(71): Xaa is Asp or Asn
LYYLQNGXDMYXXXXLDIXXLSXYXXXXXXXXXXXXXXXXXXXXXXXXXXXXXXXXXXXXXXXXNRXKXDXVP

SEQ ID NO: 22 - DNA, 4107 bp, Streptococcus pyogenes
atggataaaaagtacagcatcgggctggacatcggtacaaactcagtggggtgggccgtgattacggacgagtacaaggtaccctccaaaaaatttaaagtgctgggtaacacggacagacactctataaagaaaaatcttattggagccttgctgttcgactcaggcgagacagccgaagccacaaggttgaagcggaccgccaggaggcggtataccaggagaaagaaccgcatatgctacctgcaagaaatcttcagtaacgagatggcaaaggttgacgatagctttttccatcgcctggaagaatcctttcttgttgaggaagacaagaagcacgaacggcaccccatctttggcaatattgtcgacgaagtggcatatcacgaaaagtacccgactatctaccacctcaggaagaagctggtggactctaccgataaggcggacctcagacttatttatttggcactcgcccacatgattaaatttagaggacatttcttgatcgagggcgacctgaacccggacaacagtgacgtcgataagctgttcatccaacttgtgcagacctacaatcaactgttcgaagaaaaccctataaatgcttcaggagtcgacgctaaagcaatcctgtccgcgcgcctctcaaaatctagaagacttgagaatctgattgctcagttgcccggggaaaagaaaaatggattgtttggcaacctgatcgccctcagtctcggactgaccccaaatttcaaaagtaacttcgacctggccgaagacgctaagctccagctgtccaaggacacatacgatgacgacctcgacaatctgctggcccagattggggatcagtacgccgatctctttttggcagcaaagaacctgtccgacgccatcctgttgagcgatatcttgagagtgaacaccgaaattactaaagcaccccttagcgcatctatgatcaagcggtacgacgagcatcatcaggatctgaccctgctgaaggctcttgtgaggcaacagctccccgaaaaatacaaggaaatcttctttgaccagagcaaaaacggctacgctggctatatagatggtggggccagtcaggaggaattctataaattcatcaagcccattctcgagaaaatggacggcacagaggagttgctggtcaaacttaacagggaggacctgctgcggaagcagcggacctttgacaacgggtctatcccccaccagattcatctgggcgaactgcacgcaatcctgaggaggcaggaggatttttatccttttcttaaagataaccgcgagaaaatagaaaagattcttacattcaggatcccgtactacgtgggacctctcgcccggggcaattcacggtttgcctggatgacaaggaagtcagaggagactattacaccttggaacttcgaagaagtggtggacaagggtgcatctgcccagtctttcatcgagcggatgacaaattttgacaagaacctccctaatgagaaggtgctgcccaaacattctctgctctacgagtactttaccgtctacaatgaactgactaaagtcaagtacgtcaccgagggaatgaggaagccggcattccttagtggagaacagaagaaggcgattgtagacctgttgttcaagaccaacaggaaggtgactgtgaagcaacttaaagaagactactttaagaagatcgaatgttttgacagtgtggaaatttcaggggttgaagaccgcttcaatgcgtcattggggacttaccatgatcttctcaagatcataaaggacaaagacttcctggacaacgaagaaaatgaggatattctcgaagacatcgtcctcaccctgaccctgttcgaagacagggaaatgatagaagagcgcttgaaaacctatgcccacctcttcgacgataaagttatgaagcagctgaagcgcaggagatacacaggatggggaagattgtcaaggaagctgatcaatggaattagggataaacagagtggcaagaccatactggatttcctcaaatctgatggcttcgccaataggaacttcatgcaactgattcacgatgactctcttaccttcaaggaggacattcaaaaggctcaggtgagcgggcagggagactcccttcatgaacacatcgcgaatttggcaggttcccccgctattaaaaagggcatccttcaaactgtcaaggtggtggatgaattggtcaaggtaatgggcagacataagccagaaaatattgtgatcgagatggcccgcgaaaaccagaccacacagaagggccagaaaaatagtagagagcggatgaagaggatcgaggagggcatcaaagagctgggatctcagattctcaaagaacaccccgtagaaaacacacagctgcagaacgaaaaattgtacttgtactatctgcagaacggcagagacatgtacgtcgaccaagaacttgatattaatagactgtccgactatgacgtagaccatatcgtgccccagtccttcctgaaggacgactccattgataacaaagtcttgacaagaagcgacaagaacaggggtaaaagtgataatgtgcctagcgaggaggtggtgaaaaaaatgaagaactactggcgacagctgcttaatgcaaagctcattacacaacggaagttcgataatctgacgaaagcagagagaggtggcttgtctgagttggacaaggcagggtttattaagcggcagctggtggaaactaggcagatcacaaagcacgtggcgcagattttggacagccggatgaacacaaaatacgacgaaaatgataaactgatacgagaggtcaaagttatcacgctgaaaagcaagctggtgtccgattttcggaaagacttccagttctacaaagttcgcgagattaataactaccatcatgctcacgatgcgtacctgaacgctgttgtcgggaccgccttgataaagaagtacccaaagctggaatccgagttcgtatacggggattacaaagtgtacgatgtgaggaaaatgatagccaagtccgagcaggagattggaaaggccacagctaagtacttcttttattctaacatcatgaatttttttaagacggaaattaccctggccaacggagagatcagaaagcggccccttatagagacaaatggtgaaacaggtgaaatcgtctgggataagggcagggatttcgctactgtgaggaaggtgctgagtatgccacaggtaaatatcgtgaaaaaaaccgaagtacagaccggaggattttccaaggaaagcattttgcctaaaagaaactcagacaagctcatcgcccgcaagaaagattgggaccctaagaaatacgggggatttgactcacccaccgtagcctattctgtgctggtggtagctaaggtggaaaaaggaaagtctaagaagctgaagtccgtgaaggaactcttgggaatcactatcatggaaagatcatcctttgaaaagaaccctatcgatttcctggaggctaagggttacaaggaggtcaagaaagacctcatcattaaactgccaaaatactctctcttcgagctggaaaatggcaggaagagaatgttggccagcgccggagagctgcaaaagggaaacgagcttgctctgccctccaaatatgttaattttctctatctcgcttcccactatgaaaagctgaaagggtctcccgaagataacgagcagaagcagctgttcgtcgaacagcacaagcactatctggatgaaataatcgaacaaataagcgagttcagcaaaagggttatcctggcggatgctaatttggacaaagtactgtctgcttataacaagcaccgggataagcctattagggaacaagccgagaatataattcacctctttacactcacgaatctcggagcccccgccgccttcaaatactttgatacgactatcgaccggaaacggtataccagtaccaaagaggtcctcgatgccaccctcatccaccagtcaattactggcctgtacgaaacacggatcgacctctctcaactgggcggcgactag

SEQ ID NO: 23 - protein, 1368 aa, Streptococcus pyogenes [sequence omitted]

SEQ ID NO: 24 - DNA, 3249 bp, Neisseria meningitidis
atggccgccttcaagcccaaccccatcaactacatcctgggcctggacatcggcatcgccagcgtgggctgggccatggtggagatcgacgaggacgagaaccccatctgcctgatcgacctgggtgtgcgcgtgttcgagcgcgctgaggtgcccaagactggtgacagtctggctatggctcgccggcttgctcgctctgttcggcgccttactcgccggcgcgctcaccgccttctgcgcgctcgccgcctgctgaagcgcgagggtgtgctgcaggctgccgacttcgacgagaacggcctgatcaagagcctgcccaacactccttggcagctgcgcgctgccgctctggaccgcaagctgactcctctggagtggagcgccgtgctgctgcacctgatcaagcaccgcggctacctgagccagcgcaagaacgagggcgagaccgccgacaaggagctgggtgctctgctgaagggcgtggccgacaacgcccacgccctgcagactggtgacttccgcactcctgctgagctggccctgaacaagttcgagaaggagagcggccacatccgcaaccagcgcggcgactacagccacaccttcagccgcaaggacctgcaggccgagctgatcctgctgttcgagaagcagaaggagttcggcaacccccacgtgagcggcggcctgaaggagggcatcgagaccctgctgatgacccagcgccccgccctgagcggcgacgccgtgcagaagatgctgggccactgcaccttcgagccagccgagcccaaggccgccaagaacacctacaccgccgagcgcttcatctggctgaccaagctgaacaacctgcgcatcctggagcagggcagcgagcgccccctgaccgacaccgagcgcgccaccctgatggacgagccctaccgcaagagcaagctgacctacgcccaggcccgcaagctgctgggtctggaggacaccgccttcttcaagggcctgcgctacggcaaggacaacgccgaggccagcaccctgatggagatgaaggcctaccacgccatcagccgcgccctggagaaggagggcctgaaggacaagaagagtcctctgaacctgagccccgagctgcaggacgagatcggcaccgccttcagcctgttcaagaccgacgaggacatcaccggccgcctgaaggaccgcatccagcccgagatcctggaggccctgctgaagcacatcagcttcgacaagttcgtgcagatcagcctgaaggccctgcgccgcatcgtgcccctgatggagcagggcaagcgctacgacgaggcctgcgccgagatctacggcgaccactacggcaagaagaacaccgaggagaagatctacctgcctcctatccccgccgacgagatccgcaaccccgtggtgctgcgcgccctgagccaggcccgcaaggtgatcaacggcgtggtgcgccgctacggcagccccgcccgcatccacatcgagaccgcccgcgaggtgggcaagagcttcaaggaccgcaaggagatcgagaagcgccaggaggagaaccgcaaggaccgcgagaaggccgccgccaagttccgcgagtacttccccaacttcgtgggcgagcccaagagcaaggacatcctgaagctgcgcctgtacgagcagcagcacggcaagtgcctgtacagcggcaaggagatcaacctgggccgcctgaacgagaagggctacgtggagatcgaccacgccctgcccttcagccgcacctgggacgacagcttcaacaacaaggtgctggtgctgggcagcgagaaccagaacaagggcaaccagaccccctacgagtacttcaacggcaaggacaacagccgcgagtggcaggagttcaaggcccgcgtggagaccagccgcttcccccgcagcaagaagcagcgcatcctgctgcagaagttcgacgaggacggcttcaaggagcgcaacctgaacgacacccgctacgtgaaccgcttcctgtgccagttcgtggccgaccgcatgcgcctgaccggcaagggcaagaagcgcgtgttcgccagcaacggccagatcaccaacctgctgcgcggcttctggggcctgcgcaaggtgcgcgccgagaacgaccgccaccacgccctggacgccgtggtggtggcctgcagcaccgtggccatgcagcagaagatcacccgcttcgtgcgctacaaggagatgaacgccttcgacggtaaaaccatcgacaaggagaccggcgaggtgctgcaccagaagacccacttcccccagccctgggagttcttcgcccaggaggtgatgatccgcgtgttcggcaagcccgacggcaagcccgagttcgaggaggccgacacccccgagaagctgcgcaccctgctggccgagaagctgagcagccgccctgaggccgtgcacgagtacgtgactcctctgttcgtgagccgcgcccccaaccgcaagatgagcggtcagggtcacatggagaccgtgaagagcgccaagcgcctggacgagggcgtgagcgtgctgcgcgtgcccctgacccagctgaagctgaaggacctggagaagatggtgaaccgcgagcgcgagcccaagctgtacgaggccctgaaggcccgcctggaggcccacaaggacgaccccgccaaggccttcgccgagcccttctacaagtacgacaaggccggcaaccgcacccagcaggtgaaggccgtgcgcgtggagcaggtgcagaagaccggcgtgtgggtgcgcaaccacaacggcatcgccgacaacgccaccatggtgcgcgtggacgtgttcgagaagggcgacaagtactacctggtgcccatctacagctggcaggtggccaagggcatcctgcccgaccgcgccgtggtgcagggcaaggacgaggaggactggcagctgatcgacgacagcttcaacttcaagttcagcctgcaccccaacgacctggtggaggtgatcaccaagaaggcccgcatgttcggctacttcgccagctgccaccgcggcaccggcaacatcaacatccgcatccacgacctggaccacaagatcggcaagaacggcatcctggagggcatcggcgtgaagaccgccctgagcttccagaagtaccagatcgacgagctgggcaaggagatccgcccctgccgcctgaagaagcgccctcctgtgcgctaa

SEQ ID NO: 25 - protein, 1082 aa, Neisseria meningitidis
MAAFKPNPINYILGLDIGIASVGWAMVEIDEDENPICLIDLGVRVFERAEVPKTGDSLAMARRLARSVRRLTRRRAHRLLRARRLLKREGVLQAADFDENGLIKSLPNTPWQLRAAALDRKLTPLEWSAVLLHLIKHRGYLSQRKNEGETADKELGALLKGVADNAHALQTGDFRTPAELALNKFEKESGHIRNQRGDYSHTFSRKDLQAELILLFEKQKEFGNPHVSGGLKEGIETLLMTQRPALSGDAVQKMLGHCTFEPAEPKAAKNTYTAERFIWLTKLNNLRILEQGSERPLTDTERATLMDEPYRKSKLTYAQARKLLGLEDTAFFKGLRYGKDNAEASTLMEMKAYHAISRALEKEGLKDKKSPLNLSPELQDEIGTAFSLFKTDEDITGRLKDRIQPEILEALLKHISFDKFVQISLKALRRIVPLMEQGKRYDEACAEIYGDHYGKKNTEEKIYLPPIPADEIRNPVVLRALSQARKVINGVVRRYGSPARIHIETAREVGKSFKDRKEIEKRQEENRKDREKAAAKFREYFPNFVGEPKSKDILKLRLYEQQHGKCLYSGKEINLGRLNEKGYVEIDHALPFSRTWDDSFNNKVLVLGSENQNKGNQTPYEYFNGKDNSREWQEFKARVETSRFPRSKKQRILLQKFDEDGFKERNLNDTRYVNRFLCQFVADRMRLTGKGKKRVFASNGQITNLLRGFWGLRKVRAENDRHHALDAVVVACSTVAMQQKITRFVRYKEMNAFDGKTIDKETGEVLHQKTHFPQPWEFFAQEVMIRVFGKPDGKPEFEEADTPEKLRTLLAEKLSSRPEAVHEYVTPLFVSRAPNRKMSGQGHMETVKSAKRLDEGVSVLRVPLTQLKLKDLEKMVNREREPKLYEALKARLEAHKDDPAKAFAEPFYKYDKAGNRTQQVKAVRVEQVQKTGVWVRNHNGIADNATMVRVDVFEKGDKYYLVPIYSWQVAKGILPDRAVVQGKDEEDWQLIDDSFNFKFSLHPNDLVEVITKKARMFGYFASCHRGTGNINIRIHDLDHKIGKNGILEGIGVKTALSFQKYQIDELGKEIRPCRLKKRPPVR

SEQ ID NO: 26 - protein, 1053 aa, Staphylococcus aureus
MKRNYILGLDIGITSVGYGIIDYETRDVIDAGVRLFKEANVENNEGRRSKRGARRLKRRRRHRIQRVKKLLFDYNLLTDHSELSGINPYEARVKGLSQKLSEEEFSAALLHLAKRRGVHNVNEVEEDTGNELSTKEQISRNSKALEEKYVAELQLERLKKDGEVRGSINRFKTSDYVKEAKQLLKVQKAYHQLDQSFIDTYIDLLETRRTYYEGPGEGSPFGWKDIKEWYEMLMGHCTYFPEELRSVKYAYNADLYNALNDLNNLVITRDENEKLEYYEKFQIIENVFKQKKKPTLKQIAKEILVNEEDIKGYRVTSTGKPEFTNLKVYHDIKDITARKEIIENAELLDQIAKILTIYQSSEDIQEELTNLNSELTQEEIEQISNLKGYTGTHNLSLKAINLILDELWHTNDNQIAIFNRLKLVPKKVDLSQQKEIPTTLVDDFILSPVVKRSFIQSIKVINAIIKKYGLPNDIIIELAREKNSKDAQKMINEMQKRNRQTNERIEEIIRTTGKENAKYLIEKIKLHDMQEGKCLYSLEAIPLEDLLNNPFNYEVDHIIPRSVSFDNSFNNKVLVKQEENSKKGNRTPFQYLSSSDSKISYETFKKHILNLAKGKGRISKTKKEYLLEERDINRFSVQKDFINRNLVDTRYATRGLMNLLRSYFRVNNLDVKVKSINGGFTSFLRRKWKFKKERNKGYKHHAEDALIIANADFIFKEWKKLDKAKKVMENQMFEEKQAESMPEIETEQEYKEIFITPHQIKHIKDFKDYKYSHRVDKKPNRELINDTLYSTRKDDKGNTLIVNNLNGLYDKDNDKLKKLINKSPEKLLMYHHDPQTYQKLKLIMEQYGDEKNPLYKYYEETGNYLTKYSKKDNGPVIKKIKYYGNKLNAHLDITDDYPNSRNKVVKLSLKPYRFDVYLDNGVYKFVTVKNLDVIKKENYYEVNSKCYEEAKKLKKISNQAEFIASFYNNDLIKINGELYRVIGVNNDLLNRIEVNMIDITYREYLENMNDKRPPRIIKTIASKTQSIKKYSTDILGNLYEVKSKKHPQIIKKG

SEQ ID NO: 27 - RNA, 104 nt, Artificial Sequence
  Synthetic polynucleotide
  misc_feature (1)..(20): a, c, u, g, unknown or other
nnnnnnnnnnnnnnnnnnnnguuuuagagcuaugcugaaaagcauagcaaguuaaaauaaggcuaguccguuaucaacuugaaaaaguggcaccgagucggugc

SEQ ID NO: 28 - RNA, 106 nt, Artificial Sequence
  Synthetic polynucleotide
  misc_feature (1)..(20): a, c, u, g, unknown or other
nnnnnnnnnnnnnnnnnnnnguuuuagagcuaugcuggaaacagcauagcaaguuaaaauaaggcuaguccguuaucaacuugaaaaaguggcaccgagucggugc

SEQ ID NO: 29 - RNA, 116 nt, Artificial Sequence
  Synthetic polynucleotide
  misc_feature (1)..(20): a, c, u, g, unknown or other
nnnnnnnnnnnnnnnnnnnnguuuuagagcuaugcuguuuuggaaacaaaacagcauagcaaguuaaaauaaggcuaguccguuaucaacuugaaaaaguggcaccgagucggugc

SEQ ID NO: 30 - RNA, 96 nt, Artificial Sequence
  Synthetic oligonucleotide
  misc_feature (1)..(20): a, c, u, g, unknown or other
nnnnnnnnnnnnnnnnnnnnguauuagagcuagaaauagcaaguuaauauaaggcuaguccguuaucaacuugaaaaaguggcaccgagucggugc

SEQ ID NO: 31 - RNA, 96 nt, Artificial Sequence
  Synthetic oligonucleotide
  misc_feature (1)..(20): a, c, u, g, unknown or other
nnnnnnnnnnnnnnnnnnnnguuuaagagcuagaaauagcaaguuuaaauaaggcuaguccguuaucaacuugaaaaaguggcaccgagucggugc

SEQ ID NO: 32 - RNA, 116 nt, Artificial Sequence
  Synthetic polynucleotide
  misc_feature (1)..(20): a, c, u, g, unknown or other
nnnnnnnnnnnnnnnnnnnnguauuagagcuaugcuguauuggaaacaauacagcauagcaaguuaauauaaggcuaguccguuaucaacuugaaaaaguggcaccgagucggugc

SEQ ID NO: 33 - RNA, 47 nt, Artificial Sequence
  Synthetic oligonucleotide
aaggcuaguccguuaucaacuugaaaaaguggcaccgagucggugcu

SEQ ID NO: 34 - RNA, 49 nt, Artificial Sequence
  Synthetic oligonucleotide
aaggcuaguccguuaucaacuugaaaaaguggcaccgagucgguggugc

SEQ ID NO: 35 - RNA, 51 nt, Artificial Sequence
  Synthetic oligonucleotide
aaggcuaguccguuaucaacuugaaaaaguggcaccgagucggugcggauc

SEQ ID NO: 36 - RNA, 31 nt, Artificial Sequence
  Synthetic oligonucleotide
aaggcuaguccguuaucaacuugaaaaagug

SEQ ID NO: 37 - RNA, 18 nt, Artificial Sequence
  Synthetic oligonucleotide
aaggcuaguccguuauca

SEQ ID NO: 38 - RNA, 12 nt, Artificial Sequence
  Synthetic oligonucleotide
aaggcuaguccg

SEQ ID NO: 39 - DNA, 3159 bp, Staphylococcus aureus
atgaaaaggaactacattctggggctggacatcgggattacaagcgtggggtatgggattattgactatgaaacaagggacgtgatcgacgcaggcgtcagactgttcaaggaggccaacgtggaaaacaatgagggacggagaagcaagaggggagccaggcgcctgaaacgacggagaaggcacagaatccagagggtgaagaaactgctgttcgattacaacctgctgaccgaccattctgagctgagtggaattaatccttatgaagccagggtgaaaggcctgagtcagaagctgtcagaggaagagttttccgcagctctgctgcacctggctaagcgccgaggagtgcataacgtcaatgaggtggaagaggacaccggcaacgagctgtctacaaaggaacagatctcacgcaatagcaaagctctggaagagaagtatgtcgcagagctgcagctggaacggctgaagaaagatggcgaggtgagagggtcaattaataggttcaagacaagcgactacgtcaaagaagccaagcagctgctgaaagtgcagaaggcttaccaccagctggatcagagcttcatcgatacttatatcgacctgctggagactcggagaacctactatgagggaccaggagaagggagccccttcggatggaaagacatcaaggaatggtacgagatgctgatgggacattgcacctattttccagaagagctgagaagcgtcaagtacgcttataacgcagatctgtacaacgccctgaatgacctgaacaacctggtcatcaccagggatgaaaacgagaaactggaatactatgagaagttccagatcatcgaaaacgtgtttaagcagaagaaaaagcctacactgaaacagattgctaaggagatcctggtcaacgaagaggacatcaagggctaccgggtgacaagcactggaaaaccagagttcaccaatctgaaagtgtatcacgatattaaggacatcacagcacggaaagaaatcattgagaacgccgaactgctggatcagattgctaagatcctgactatctaccagagctccgaggacatccaggaagagctgactaacctgaacagcgagctgacccaggaagagatcgaacagattagtaatctgaaggggtacaccggaacacacaacctgtccctgaaagctatcaatctgattctggatgagctgtggcatacaaacgacaatcagattgcaatctttaaccggctgaagctggtcccaaaaaaggtggacctgagtcagcagaaagagatcccaaccacactggtggacgatttcattctgtcacccgtggtcaagcggagcttcatccagagcatcaaagtgatcaacgccatcatcaagaagtacggcctgcccaatgatatcattatcgagctggctagggagaagaacagcaaggacgcacagaagatgatcaatgagatgcagaaacgaaaccggcagaccaatgaacgcattgaagagattatccgaactaccgggaaagagaacgcaaagtacctgattgaaaaaatcaagctgcacgatatgcaggagggaaagtgtctgtattctctggaggccatccccctggaggacctgctgaacaatccattcaactacgaggtcgatcatattatccccagaagcgtgtccttcgacaattcctttaacaacaaggtgctggtcaagcaggaagagaactctaaaaagggcaataggactcctttccagtacctgtctagttcagattccaagatctcttacgaaacctttaaaaagcacattctgaatctggccaaaggaaagggccgcatcagcaagaccaaaaaggagtacctgctggaagagcgggacatcaacagattctccgtccagaaggattttattaaccggaatctggtggacacaagatacgctactcgcggcctgatgaatctgctgcgatcctatttccgggtgaacaatctggatgtgaaagtcaagtccatcaacggcgggttcacatcttttctgaggcgcaaatggaagtttaaaaaggagcgcaacaaagggtacaagcaccatgccgaagatgctctgattatcgcaaatgccgacttcatctttaaggagtggaaaaagctggacaaagccaagaaagtgatggagaaccagatgttcgaagagaagcaggccgaatctatgcccgaaatcgagacagaacaggagtacaaggagattttcatcactcctcaccagatcaagcatatcaaggatttcaaggactacaagtactctcaccgggtggataaaaagcccaacagagagctgatcaatgacaccctgtatagtacaagaaaagacgataaggggaataccctgattgtgaacaatctgaacggactgtacgacaaagataatgacaagctgaaaaagctgatcaacaaaagtcccgagaagctgctgatgtaccaccatgatcctcagacatatcagaaactgaagctgattatggagcagtacggcgacgagaagaacccactgtataagtactatgaagagactgggaactacctgaccaagtatagcaaaaaggataatggccccgtgatcaagaagatcaagtactatgggaacaagctgaatgcccatctggacatcacagacgattaccctaacagtcgcaacaaggtggtcaagctgtcactgaagccatacagattcgatgtctatctggacaacggcgtgtataaatttgtgactgtcaagaatctggatgtcatcaaaaaggagaactactatgaagtgaatagcaagtgctacgaagaggctaaaaagctgaaaaagattagcaaccaggcagagttcatcgcctccttttacaacaacgacctgattaagatcaatggcgaactgtatagggtcatcggggtgaacaatgatctgctgaaccgcattgaagtgaatatgattgacatcacttaccgagagtatctggaaaacatgaatgataagcgcccccctcgaattatcaaaacaattgcctctaagactcagagtatcaaaaagtactcaaccgacattctgggaaacctgtatgaggtgaagagcaaaaagcaccctcagattatcaaaaagggc

SEQ ID NO: 40 - RNA, 102 nt, Artificial Sequence
  Synthetic oligonucleotide
  misc_feature (1)..(20): n is a, c, g, or u
nnnnnnnnnnnnnnnnnnnnguuuuaguacucuggaaacagaaucuacuaaaacaaggcaaaaugccguguuuaucucgucaacuuguuggcgagauuuuuu

SEQ ID NO: 41 - skipped

SEQ ID NO: 42 - RNA, 42 nt, Streptococcus pyogenes
  misc_feature (1)..(20): a, c, u, g, unknown or other
nnnnnnnnnnnnnnnnnnnnguuuuagagcuaugcuguuuug

SEQ ID NO: 43 - RNA, 85 nt, Streptococcus pyogenes
ggaaccauucaaaacagcauagcaaguuaaaauaaggcuaguccguuaucaacuugaaaaaguggcaccgagucggugcuuuuuu

SEQ ID NO: 44 - RNA, 62 nt, Streptococcus pyogenes
  misc_feature (1)..(20): a, c, u, g, unknown or other
nnnnnnnnnnnnnnnnnnnnguuuuagagcuagaaauagcaaguuaaaauaaggcuaguccg

SEQ ID NO: 45 - RNA, 102 nt, Streptococcus pyogenes
  misc_feature (1)..(20): a, c, u, g, unknown or other
nnnnnnnnnnnnnnnnnnnnguuuuagagcuagaaauagcaaguuaaaauaaggcuaguccguuaucaacuugaaaaaguggcaccgagucggugcuuuuuu

SEQ ID NO: 46 - RNA, 75 nt, Streptococcus pyogenes
  misc_feature (1)..(20): a, c, u, g, unknown or other
nnnnnnnnnnnnnnnnnnnnguuuuagagcuaugcugaaaagcauagcaaguuaaaauaaggcuaguccguuauc

SEQ ID NO: 47 - RNA, 87 nt, Streptococcus pyogenes
  misc_feature (1)..(20): a, c, u, g, unknown or other
nnnnnnnnnnnnnnnnnnnnguuuuagagcuaugcuguuuuggaaacaaaacagcauagcaaguuaaaauaaggcuaguccguuauc

SEQ ID NO: 48 - RNA, 42 nt, Streptococcus thermophilus
  misc_feature (1)..(20): a, c, u, g, unknown or other
nnnnnnnnnnnnnnnnnnnnguuuuagagcuguguuguuucg

SEQ ID NO: 49 - RNA, 78 nt, Streptococcus thermophilus
gggcgaaacaacacagcgaguuaaaauaaggcuuaguccguacucaacuugaaaagguggcaccgauucgguguuuuu

SEQ ID NO: 50 - RNA, 42 nt, Streptococcus pyogenes; identical to SEQ ID NO: 42
  misc_feature (1)..(20): a, c, u, g, unknown or other

SEQ ID NO: 51 - RNA, 42 nt, Streptococcus thermophilus; identical to SEQ ID NO: 48
  misc_feature (1)..(20): a, c, u, g, unknown or other

SEQ ID NO: 52 - RNA, 85 nt, Streptococcus pyogenes
gaaccauucaaaacagcauagcaaguuaaaauaaggcuaguccguuaucaacuugaaaaaguggcaccgagucggugcuuuuuuu

SEQ ID NO: 53 - RNA, 78 nt, Streptococcus thermophilus; identical to SEQ ID NO: 49

SEQ ID NO: 54 - protein, 12 aa, Artificial Sequence
  Synthetic peptide
DIGTNSVGWAVT

SEQ ID NO: 55 - protein, 12 aa, Artificial Sequence
  Synthetic peptide
DIGTNSVGWAVT

SEQ ID NO: 56 - protein, 12 aa, Artificial Sequence
  Synthetic peptide
DVGTNSVGWAVT

SEQ ID NO: 57 - protein, 12 aa, Artificial Sequence
  Synthetic peptide
DVGTNSVGWAVT

SEQ ID NO: 58 - protein, 12 aa, Artificial Sequence
  Synthetic peptide
DMGTNSVGWAVT

SEQ ID NO: 59 - protein, 12 aa, Artificial Sequence
  Synthetic peptide
DVGTSSVGWAVT

SEQ ID NO: 60 - protein, 12 aa, Artificial Sequence
  Synthetic peptide
DIGTASVGWAVT

SEQ ID NO: 61 - protein, 12 aa, Artificial Sequence
  Synthetic peptide
DVGTGSVGWAVT

SEQ ID NO: 62 - protein, 12 aa, Artificial Sequence
  Synthetic peptide
DIGTNSVGWAVV

SEQ ID NO: 63 - protein, 12 aa, Artificial Sequence
  Synthetic peptide
DIGTNSVGWAVI

SEQ ID NO: 64 - protein, 12 aa, Artificial Sequence
  Synthetic peptide
DIGTNSVGWAVL

SEQ ID NO: 65 - protein, 12 aa, Artificial Sequence
  Synthetic peptide
DLGTNSIGWAVV

SEQ ID NO: 66 - protein, 11 aa, Artificial Sequence
  Synthetic peptide
DLGTNSIGWAI

SEQ ID NO: 67 - protein, 12 aa, Artificial Sequence
  Synthetic peptide
DLGTNSIGWALV

SEQ ID NO: 68 - protein, 12 aa, Artificial Sequence
  Synthetic peptide
DIGTNSVGWCVT

SEQ ID NO: 69 - protein, 12 aa, Artificial Sequence
  Synthetic peptide
DIGTNSVGYAVT

SEQ ID NO: 70 - protein, 12 aa, Artificial Sequence
  Synthetic peptide
DMGTGSLGWAVT

SEQ ID NO: 71 - protein, 12 aa, Artificial Sequence
  Synthetic peptide
DIGTSSVGWAAI

SEQ ID NO: 72 - protein, 12 aa, Artificial Sequence
  Synthetic peptide
DLGTGSVGWAVV

SEQ ID NO: 73 - protein, 12 aa, Artificial Sequence
  Synthetic peptide
DLGVGSVGWAIV

SEQ ID NO: 74 - protein, 12 aa, Artificial Sequence
  Synthetic peptide
DLGIASIGWAII

SEQ ID NO: 75 - protein, 12 aa, Artificial Sequence
  Synthetic peptide
DLGIASVGWAIV

SEQ ID NO: 76 - protein, 12 aa, Artificial Sequence
  Synthetic peptide
DLGVASVGWSIV

SEQ ID NO: 77 - protein, 12 aa, Artificial Sequence
  Synthetic peptide
DIGIASVGWAIL

SEQ ID NO: 78 - protein, 12 aa, Artificial Sequence
  Synthetic peptide
DLGISSVGWSVI

SEQ ID NO: 79 - protein, 12 aa, Artificial Sequence
  Synthetic peptide
DIGIASVGWSVI

SEQ ID NO: 80 - protein, 12 aa, Artificial Sequence
  Synthetic peptide
DVGIGSIGWAVI

SEQ ID NO: 81 - protein, 12 aa, Artificial Sequence
  Synthetic peptide
DLGVGSIGFAIV

SEQ ID NO: 82 - protein, 12 aa, Artificial Sequence
  Synthetic peptide
DIGYASIGWAVI

SEQ ID NO: 83 - protein, 12 aa, Artificial Sequence
  Synthetic peptide
DTGTNSLGWAIV

SEQ ID NO: 84 - protein, 12 aa, Artificial Sequence
  Synthetic peptide
DLGTNSIGWCLL

SEQ ID NO: 85 - protein, 12 aa, Artificial Sequence
  Synthetic peptide
DIGTDSLGWAVF

SEQ ID NO: 86 - protein, 12 aa, Artificial Sequence
  Synthetic peptide
DIGSNSIGFAVV

SEQ ID NO: 87 - protein, 12 aa, Artificial Sequence
  Synthetic peptide
DLGVGSIGVAVA

SEQ ID NO: 88 - protein, 12 aa, Artificial Sequence
  Synthetic peptide
DLGIASCGWGVV

SEQ ID NO: 89 - protein, 12 aa, Artificial Sequence
  Synthetic peptide
DLGIASVGWCLT

SEQ ID NO: 90 - protein, 12 aa, Artificial Sequence
  Synthetic peptide
DIGIGSVGVGIL

SEQ ID NO: 91 - protein, 12 aa, Artificial Sequence
  Synthetic peptide
DIGITSVGYGLI

SEQ ID NO: 92 - protein, 12 aa, Artificial Sequence
  Synthetic peptide
DIGITSVGFGII

SEQ ID NO: 93 - protein, 12 aa, Artificial Sequence
  Synthetic peptide
DVGITSTGYAVL

SEQ ID NO: 94 - protein, 12 aa, Artificial Sequence
  Synthetic peptide
DLGITSFGYAIL

SEQ ID NO: 95 - protein, 12 aa, Artificial Sequence
  Synthetic peptide
DIGNASVGWSAF

SEQ ID NO: 96 - protein, 12 aa, Artificial Sequence
  Synthetic peptide
DVGTNSCGWVAM

SEQ ID NO: 97 - protein, 12 aa, Artificial Sequence
  Synthetic peptide
DVGERSIGLAAV

SEQ ID NO: 98 - protein, 12 aa, Artificial Sequence
  Synthetic peptide
DVGLNSVGLAAV

SEQ ID NO: 99 - protein, 12 aa, Artificial Sequence
  Synthetic peptide
DVGLMSVGLAAI

SEQ ID NO: 100 - protein, 12 aa, Artificial Sequence
  Synthetic peptide
DVGTFSVGLAAI

SEQ ID NO: 101 - protein, 12 aa, Artificial Sequence
  Synthetic peptide
DIGTGSVGYACM

SEQ ID NO: 102 - protein, 12 aa, Artificial Sequence
  Synthetic peptide
DLGTTSIGFAHI

SEQ ID NO: 103 - protein, 12 aa, Artificial Sequence
  Synthetic peptide
DLGTNSIGSSVR

SEQ ID NO: 104 - protein, 12 aa, Artificial Sequence
  Synthetic peptide
DIGTNSVGWAVT

SEQ ID NO: 105 - protein, 12 aa, Artificial Sequence
  Synthetic peptide
DIGTNSVGWAVT

SEQ ID NO: 106 - protein, 12 aa, Artificial Sequence
  Synthetic peptide
DVGTNSVGWAVT

SEQ ID NO: 107 - protein, 12 aa, Artificial Sequence
  Synthetic peptide
DVGTNSVGWAVT

SEQ ID NO: 108 - protein, 12 aa, Artificial Sequence
  Synthetic peptide
DMGTNSVGWAVT

SEQ ID NO: 109 - protein, 12 aa, Artificial Sequence
  Synthetic peptide
DVGTSSVGWAVT

SEQ ID NO: 110 - protein, 12 aa, Artificial Sequence
  Synthetic peptide
DIGTASVGWAVT

SEQ ID NO: 111 - protein, 12 aa, Artificial Sequence
  Synthetic peptide
DVGTGSVGWAVT

SEQ ID NO: 112 - protein, 12 aa, Artificial Sequence
  Synthetic peptide
DIGTNSVGWAVV

SEQ ID NO: 113 - protein, 12 aa, Artificial Sequence
  Synthetic peptide
DIGTNSVGWAVI

SEQ ID NO: 114 - protein, 12 aa, Artificial Sequence
  Synthetic peptide
DIGTNSIGWAVI

SEQ ID NO: 115 - protein, 12 aa, Artificial Sequence
  Synthetic peptide
DIGTNSVGWAVL

SEQ ID NO: 116 - protein, 12 aa, Artificial Sequence
  Synthetic peptide
DLGTNSIGWAVV

SEQ ID NO: 117 - protein, 11 aa, Artificial Sequence
  Synthetic peptide
DLGTNSIGWAI

SEQ ID NO: 118 - protein, 12 aa, Artificial Sequence
  Synthetic peptide
DLGTNSIGWALV

SEQ ID NO: 119 - protein, 12 aa, Artificial Sequence
  Synthetic peptide
DIGTNSVGWCVT

SEQ ID NO: 120 - protein, 12 aa, Artificial Sequence
  Synthetic peptide
DIGTNSVGYAVT

SEQ ID NO: 121 - protein, 12 aa, Artificial Sequence
  Synthetic peptide
DMGTGSLGWAVT

SEQ ID NO: 122 - protein, 12 aa, Artificial Sequence
  Synthetic peptide
DIGTSSVGWAAI

SEQ ID NO: 123 - protein, 12 aa, Artificial Sequence
  Synthetic peptide
DLGTGSVGWAVV

SEQ ID NO: 124 - protein, 12 aa, Artificial Sequence
  Synthetic peptide
DLGVGSVGWAIV

SEQ ID NO: 125 - protein, 12 aa, Artificial Sequence
  Synthetic peptide
DLGIASIGWAII

SEQ ID NO: 126 - protein, 12 aa, Artificial Sequence
  Synthetic peptide
DLGIASVGWAIV

SEQ ID NO: 127 - protein, 12 aa, Artificial Sequence
  Synthetic peptide
DLGIASVGWAVV

SEQ ID NO: 128 - protein, 12 aa, Artificial Sequence
  Synthetic peptide
DLGVASVGWSIV

SEQ ID NO: 129 - protein, 12 aa, Artificial Sequence
  Synthetic peptide
DIGIASVGWAIL

SEQ ID NO: 130 - protein, 12 aa, Artificial Sequence
  Synthetic peptide
DIGIASVGWAVL

SEQ ID NO: 131 - protein, 12 aa, Artificial Sequence
  Synthetic peptide
DIGIASIGWAVI

SEQ ID NO: 132 - protein, 12 aa, Artificial Sequence
  Synthetic peptide
DIGIASVGWAII

SEQ ID NO: 133 - protein, 12 aa, Artificial Sequence
  Synthetic peptide
DVGIASVGWAVI

SEQ ID NO: 134 - protein, 11 aa, Artificial Sequence
  Synthetic peptide
DIGIASVGWAL

SEQ ID NO: 135 - protein, 12 aa, Artificial Sequence
  Synthetic peptide
DIGIASVGWAMV

SEQ ID NO: 136 - protein, 12 aa, Artificial Sequence
  Synthetic peptide
DIGIASVGWSVI

SEQ ID NO: 137 - protein, 12 aa, Artificial Sequence
  Synthetic peptide
DLGISSVGWSVI

SEQ ID NO: 138 - protein, 12 aa, Artificial Sequence
  Synthetic peptide
DIGITSVGWAVI

SEQ ID NO: 139 - protein, 12 aa, Artificial Sequence
  Synthetic peptide
DVGIGSIGWAVI

SEQ ID NO: 140 - protein, 12 aa, Artificial Sequence
  Synthetic peptide
DLGISSLGWAIV

SEQ ID NO: 141 - protein, 12 aa, Artificial Sequence
  Synthetic peptide
DLGVGSIGFAIV

SEQ ID NO: 142 - protein, 12 aa, Artificial Sequence
  Synthetic peptide
DIGYASIGWAVI

SEQ ID NO: 143 - protein, 12 aa, Artificial Sequence
  Synthetic peptide
DLGTNSIGWCLL

SEQ ID NO: 144 - protein, 12 aa, Artificial Sequence
  Synthetic peptide
DLGTNSIGWGLL

SEQ ID NO: 145 - protein, 12 aa, Artificial Sequence
  Synthetic peptide
DTGTNSLGWAIV

SEQ ID NO: 146 - protein, 12 aa, Artificial Sequence
  Synthetic peptide
DIGTDSLGWAVF

SEQ ID NO: 147 - protein, 12 aa, Artificial Sequence
  Synthetic peptide
DLGSTSLGWAIF

SEQ ID NO: 148 - protein, 12 aa, Artificial Sequence
  Synthetic peptide
DIGISSIGWAFS

SEQ ID NO: 149 - protein, 12 aa, Artificial Sequence
  Synthetic peptide
DLGIASVGWCLT

SEQ ID NO: 150 - protein, 12 aa, Artificial Sequence
  Synthetic peptide
DLGIASCGWGVV

SEQ ID NO: 151 - protein, 12 aa, Artificial Sequence
  Synthetic peptide
DIGSNSIGFAVV

SEQ ID NO: 152 - protein, 12 aa, Artificial Sequence
  Synthetic peptide
DIGTTSIGFSVI

SEQ ID NO: 153 - protein, 12 aa, Artificial Sequence
  Synthetic peptide
DIGITSVGYGLI

SEQ ID NO: 154 - protein, 12 aa, Artificial Sequence
  Synthetic peptide
DIGITSVGFGII

SEQ ID NO: 155 - protein, 12 aa, Artificial Sequence
  Synthetic peptide
DLGTTSIGFAHI

SEQ ID NO: 156 - protein, 12 aa, Artificial Sequence
  Synthetic peptide
DIGIGSVGVGIL

SEQ ID NO: 157 - protein, 12 aa, Artificial Sequence
  Synthetic peptide
DLGVGSIGVAVA

SEQ ID NO: 158 - protein, 12 aa, Artificial Sequence
  Synthetic peptide
DVGITSTGYAVL

SEQ ID NO: 159 - protein, 12 aa, Artificial Sequence
  Synthetic peptide
DLGITSFGYAIL

SEQ ID NO: 160 - protein, 12 aa, Artificial Sequence
  Synthetic peptide
DIGTSSIGWWLY

SEQ ID NO: 161 - protein, 12 aa, Artificial Sequence
  Synthetic peptide
DLGSNSLGWFVT

SEQ ID NO: 162 - protein, 12 aa, Artificial Sequence
  Synthetic peptide
DLGANSLGWFVV

SEQ ID NO: 163 - protein, 12 aa, Artificial Sequence
  Synthetic peptide
DIGNASVGWSAF

SEQ ID NO: 164 - protein, 12 aa, Artificial Sequence
  Synthetic peptide
DVGTNSCGWVAM

SEQ ID NO: 165 - protein, 12 aa, Artificial Sequence
  Synthetic peptide
DVGERSIGLAAV

SEQ ID NO: 166 - protein, 12 aa, Artificial Sequence
  Synthetic peptide
DVGLNSVGLAAV

SEQ ID NO: 167 - protein, 12 aa, Artificial Sequence
  Synthetic peptide
DVGLMSVGLAAI

SEQ ID NO: 168 - protein, 12 aa, Artificial Sequence
  Synthetic peptide
DVGTFSVGLAAI

SEQ ID NO: 169 - protein, 12 aa, Artificial Sequence
  Synthetic peptide
DIGTGSVGYACM

SEQ ID NO: 170 - protein, 12 aa, Artificial Sequence
  Synthetic peptide
DLGTNSIGSSVR

SEQ ID NO: 171 - protein, 15 aa, Artificial Sequence
  Synthetic peptide
DIGLRIGITSCGWSI

SEQ ID NO: 172 - protein, 12 aa, Artificial Sequence
  Synthetic peptide
DMGAKYTGVFYA

SEQ ID NO: 173 - protein, 12 aa, Artificial Sequence
  Synthetic peptide
DLGGKNTGFFSF

SEQ ID NO: 174 - protein, 12 aa, Artificial Sequence
  Synthetic peptide
DLGVKNTGVFSA

SEQ ID NO: 175 - protein, 12 aa, Artificial Sequence
  Synthetic peptide
DLGAKFTGVALY

SEQ ID NO: 176 - protein, 12 aa, Artificial Sequence
  Synthetic peptide
DLGGKFTGVCLS

SEQ ID NO: 177 - protein, 12 aa, Artificial Sequence
  Synthetic peptide
DLGGTYTGTFIT

SEQ ID NO: 178 - protein, 28 aa, Artificial Sequence
  Synthetic peptide
YDIDHIYPRSLTKDDSFDNLVLCERTAN

SEQ ID NO: 179 - protein, 28 aa, Artificial Sequence
  Synthetic peptide
DIDHIYPRSKVIKDDSFDNLVLVLKNEN

SEQ ID NO: 180 - protein, 27 aa, Artificial Sequence
  Synthetic peptide
DRDHIYPQSKIKDDSIDNLVLVNKTYN

SEQ ID NO: 181 - protein, 27 aa, Artificial Sequence
  Synthetic peptide
DIDHIYPRSKIKDDSITNRVLVEKDIN

SEQ ID NO: 182 - protein, 27 aa, Artificial Sequence
  Synthetic peptide
DIDHIYPQSKIKDDSISNRVLVCSSCN

SEQ ID NO: 183 - protein, 27 aa, Artificial Sequence
  Synthetic peptide
DIDHIYPQSKTMDDSLNNRVLVKKNYN

SEQ ID NO: 184 - protein, 27 aa, Artificial Sequence
  Synthetic peptide
DQDHIYPKSKIYDDSLENRVLVKKNLN

SEQ ID NO: 185 - protein, 27 aa, Artificial Sequence
  Synthetic peptide
QIDHIVPQSLVKDDSFDNRVLVVPSEN

SEQ ID NO: 186 - protein, 27 aa, Artificial Sequence
  Synthetic peptide
DIDHIIPQAFIKDNSIDNRVLTSSKEN

SEQ ID NO: 187 - protein, 27 aa, Artificial Sequence
  Synthetic peptide
DIDHIIPQAFLKDNSIDNKVLVSSASN

SEQ ID NO: 188 - protein, 27 aa, Artificial Sequence
  Synthetic peptide
DIDHIIPQAYTKDNSLDNRVLVSNITN

SEQ ID NO: 189 - protein, 27 aa, Artificial Sequence
  Synthetic peptide
DIDHIVPQSFITDNSIDNLVLTSSAGN

SEQ ID NO: 190 - protein, 27 aa, Artificial Sequence
  Synthetic peptide
DVDHIVPQSFLKDDSIDNKVLTRSDKN

SEQ ID NO: 191 - protein, 27 aa, Artificial Sequence
  Synthetic peptide
NIDHIYPQSMVKDDSLDNKVLVQSEIN

SEQ ID NO: 192 - protein, 27 aa, Artificial Sequence
  Synthetic peptide
DIDHILPQSLIKDDSLDNRVLVNATIN

SEQ ID NO: 193 - protein, 27 aa, Artificial Sequence
  Synthetic peptide
DIDHILPQSFIKDDSLENRVLVKKAVN

SEQ ID NO: 194 - protein, 27 aa, Artificial Sequence
  Synthetic peptide
EVDHIFPRSFIKDDSIDNKVLVIKKMN

SEQ ID NO: 195 - protein, 27 aa, Artificial Sequence
  Synthetic peptide
EVDHIIPRSYIKDDSFENKVLVYREEN

SEQ ID NO: 196 - protein, 27 aa, Artificial Sequence
  Synthetic peptide
DIDHIIPQAVTQNDSIDNRVLVARAEN

SEQ ID NO: 197 - protein, 27 aa, Artificial Sequence
  Synthetic peptide
EIDHIIPYSISFDDSSSNKLLVLAESN

SEQ ID NO: 198 - protein, 27 aa, Artificial Sequence
  Synthetic peptide
EIDHIIPYSLCFDDSSANKVLVHKQSN

SEQ ID NO: 199 - protein, 27 aa, Artificial Sequence
  Synthetic peptide
DIDHIIPYSRSMDDSYSNKVLVLSGEN

SEQ ID NO: 200 - protein, 27 aa, Artificial Sequence
  Synthetic peptide
DIDHIIPYSKSMDDSFNNKVLCLAEEN

SEQ ID NO: 201 - protein, 27 aa, Artificial Sequence
  Synthetic peptide
EIDHIYPYSRSFDDSYMNKVLVFTKQN

SEQ ID NO: 202 - protein, 27 aa, Artificial Sequence
  Synthetic peptide
QIDHIYPYSRSMDDSYMNKVLVLTDEN

SEQ ID NO: 203 - protein, 27 aa, Artificial Sequence
  Synthetic peptide
EIDHIIPFSRSFDDSLSNKILVLGSEN

SEQ ID NO: 204 - protein, 27 aa, Artificial Sequence
  Synthetic peptide
EIDHALPFSRTWDDSFNNKVLVLGSEN

SEQ ID NO: 205 - protein, 27 aa, Artificial Sequence
  Synthetic peptide
EIDHALPFSRTWDDSFNNKVLVLASEN

SEQ ID NO: 206 - protein, 27 aa, Artificial Sequence
  Synthetic peptide
EIDHIIPISISLDDSINNKVLVLSKAN

SEQ ID NO: 207 - protein, 27 aa, Artificial Sequence
  Synthetic peptide
EVDHIIPISISLDDSITNKVLVTHREN

SEQ ID NO: 208 - protein, 27 aa, Artificial Sequence
  Synthetic peptide
QVDHALPYSRSYDDSKNNKVLVLTHEN

SEQ ID NO: 209 - protein, 27 aa, Artificial Sequence
  Synthetic peptide
EVDHILPLSITFDDSLANKVLVYATAN

SEQ ID NO: 210 - protein, 27 aa, Artificial Sequence
  Synthetic peptide
EIDHIIPRSISFDDARSNKVLVYRSEN

SEQ ID NO: 211 - protein, 27 aa, Artificial Sequence
  Synthetic peptide
EVDHIIPRSVSFDNSYHNKVLVKQSEN

SEQ ID NO: 212 - protein, 27 aa, Artificial Sequence
  Synthetic peptide
DIDHILPYSITFDDSFRNKVLVTSQEN

SEQ ID NO: 213 - protein, 27 aa, Artificial Sequence
  Synthetic peptide
EIDHILPRSRSADDSFANKVLCLARAN

SEQ ID NO: 214 - protein, 27 aa, Artificial Sequence
  Synthetic peptide
EIEHLLPFSLTLDDSMANKTVCFRQAN

SEQ ID NO: 215 - protein, 27 aa, Artificial Sequence
  Synthetic peptide
DIDHILPFSVSLDDSAANKVVCLREAN

SEQ ID NO: 216 - protein, 27 aa, Artificial Sequence
  Synthetic peptide
DIDHLIPFSISWDDSAANKVVCMRYAN

SEQ ID NO: 217 - protein, 27 aa, Artificial Sequence
  Synthetic peptide
DIDHILPVAMTLDDSPANKIICMRYAN

SEQ ID NO: 218 - protein, 27 aa, Artificial Sequence
  Synthetic peptide
DVDHILPYSRTLDDSFPNRTLCLREAN

SEQ ID NO: 219 - protein, 27 aa, Artificial Sequence
  Synthetic peptide
EIEHILPFSRTLDDSLNNRTVAMRRAN

SEQ ID NO: 220 - protein, 27 aa, Artificial Sequence
  Synthetic peptide
EVDHIIPYSISWDDSYTNKVLTSAKCN

SEQ ID NO: 221 - protein, 27 aa, Artificial Sequence
  Synthetic peptide
QVDHILPWSRFGDDSYLNKTLCTARSN

SEQ ID NO: 222 - protein, 27 aa, Artificial Sequence
  Synthetic peptide
QVDHILPFSKTLDDSFANKVLAQHDAN

SEQ ID NO: 223 - protein, 27 aa, Artificial Sequence
  Synthetic peptide
QIDHAFPLSRSLDDSQSNKVLCLTSSN

SEQ ID NO: 224 - protein, 27 aa, Artificial Sequence
  Synthetic peptide
DIDHIVPRSISFDDSFSNLVIVNKLDN

SEQ ID NO: 225 - protein, 27 aa, Artificial Sequence
  Synthetic peptide
EIEHIIPYSMSYDNSQANKILTEKAEN

SEQ ID NO: 226 - protein, 27 aa, Artificial Sequence
  Synthetic peptide
EIDHVIPYSKSADDSWFNKLLVKKSTN

SEQ ID NO: 227 - protein, 27 aa, Artificial Sequence
  Synthetic peptide
EMDHILPYSRSLDNGWHNRVLVHGKDN

SEQ ID NO: 228 - protein, 27 aa, Artificial Sequence
  Synthetic peptide
EVDHIVPYSLILDNTINNKALVYAEEN

SEQ ID NO: 229 - protein, 27 aa, Artificial Sequence
  Synthetic peptide
EIEHVIPQSLYFDDSFSNKVICEAEVN

SEQ ID NO: 230 - protein, 27 aa, Artificial Sequence
  Synthetic peptide
DIEHIIPQARLFDDSFSNKTLEARSVN

SEQ ID NO: 231 - protein, 27 aa, Artificial Sequence
  Synthetic peptide
EIEHIVPKARVFDDSFSNKTLTFHRIN

SEQ ID NO: 232 - protein, 28 aa, Artificial Sequence
  Synthetic peptide
DKDHIIPQSMKKDDSIINNLVLVNKNAN

SEQ ID NO: 233 - protein, 27 aa, Artificial Sequence
  Synthetic peptide
EVEHIWPRSRSFDNSPRNKTLCRKDVN

SEQ ID NO: 234 - protein, 27 aa, Artificial Sequence
  Synthetic peptide
IVNHIIPYNRSFDDTYHNRVLTLTETK

SEQ ID NO: 235 - protein, 27 aa, Artificial Sequence
  Synthetic peptide
DMEHTIPKSISFDNSDQNLTLCESYYN

SEQ ID NO: 236 - protein, 27 aa, Artificial Sequence
  Synthetic peptide
DIEHTIPRSAGGDSTKMNLTLCSSRFN

SEQ ID NO: 237 - protein, 27 aa, Artificial Sequence
  Synthetic peptide
DIEHTIPRSISQDNSQMNKTLCSLKFN

SEQ ID NO: 238 - protein, 27 aa, Artificial Sequence
  Synthetic peptide
DIDHVIPLARGGRDSLDNMVLCQSDAN

SEQ ID NO: 239 - protein, 27 aa, Artificial Sequence
  Synthetic peptide
DIEHLFPIAESEDNGRNNLVISHSACN

SEQ ID NO: 240 - protein, 27 aa, Artificial Sequence
  Synthetic peptide
DVDHIFPRDDTADNSYGNKVVAHRQCN

SEQ ID NO: 241 - protein, 27 aa, Artificial Sequence
  Synthetic peptide
DIEHIVPQSLGGLSTDYNTIVTLKSVN

SEQ ID NO: 242 - protein, 27 aa, Artificial Sequence
  Synthetic peptide
ELDHIVPRTDGGSNRHENLAITCGACN

SEQ ID NO: 243 - protein, 28 aa, Artificial Sequence
  Synthetic peptide
EMDHIVPRKGVGSTNTRTNFAAVCAECN

SEQ ID NO: 244 - protein, 28 aa, Artificial Sequence
  Synthetic peptide
EMDHIVPRKGVGSTNTRVNLAAACAACN

SEQ ID NO: 245 - protein, 28 aa, Artificial Sequence
  Synthetic peptide
EMDHIVPRAGQGSTNTRENLVAVCHRCN

SEQ ID NO: 246 - protein, 33 aa, Artificial Sequence
  Synthetic polypeptide
EIDHILPRSLIKDARGIVFNAEPNLIYASSRGN

SEQ ID NO: 247 - protein, 33 aa, Artificial Sequence
  Synthetic polypeptide
EIDHIIPRSLTGRTKKTVFNSEANLIYCSSKGN

SEQ ID NO: 248 - protein, 33 aa, Artificial Sequence
  Synthetic polypeptide
EIDHIIPRSLTLKKSESIYNSEVNLIFVSAQGN

SEQ ID NO: 249 - protein, 33 aa, Artificial Sequence
  Synthetic polypeptide
EIDHIYPRSLSKKHFGVIFNSEVNLIYCSSQGN

SEQ ID NO: 250 - protein, 33 aa, Artificial Sequence
  Synthetic polypeptide
EIDHILPRSHTLKIYGTVFNPEGNLIYVHQKCN

SEQ ID NO: 251 - protein, 30 aa, Artificial Sequence
  Synthetic polypeptide
ELDHIIPRSHKKYGTLNDEANLICVTRGDN

SEQ ID NO: 252 - protein, 27 aa, Artificial Sequence
  Synthetic peptide
ELEHIVPHSFRQSNALSSLVLTWPGVN

SEQ ID NO: 253 - protein, 28 aa, Artificial Sequence
  Synthetic peptide
YDIDHIYPRSLTKDDSFDNLVLCERTAN

SEQ ID NO: 254 - protein, 28 aa, Artificial Sequence
  Synthetic peptide
DIDHIYPRSKVIKDDSFDNLVLVLKNEN

SEQ ID NO: 255 - protein, 27 aa, Artificial Sequence
  Synthetic peptide
DRDHIYPQSKIKDDSIDNLVLVNKTYN

SEQ ID NO: 256 - protein, 27 aa, Artificial Sequence
  Synthetic peptide
DIDHIYPRSKIKDDSITNRVLVEKDIN

SEQ ID NO: 257 - protein, 27 aa, Artificial Sequence
  Synthetic peptide
DIDHIYPQSKIKDDSISNRVLVCSSCN

SEQ ID NO: 258 - protein, 27 aa, Artificial Sequence
  Synthetic peptide
DIDHIYPQSKTMDDSLNNRVLVKKNYN

SEQ ID NO: 259 - protein, 27 aa, Artificial Sequence
  Synthetic peptide
DQDHIYPKSKIYDDSLENRVLVKKNLN

SEQ ID NO: 260 - protein, 27 aa, Artificial Sequence
  Synthetic peptide
QIDHIVPQSLVKDDSFDNRVLVVPSEN

SEQ ID NO: 261 - protein, 27 aa, Artificial Sequence
  Synthetic peptide
DIDHIIPQAFIKDNSIDNRVLTSSKEN

SEQ ID NO: 262 - protein, 27 aa, Artificial Sequence
  Synthetic peptide
DIDHIIPQAFLKDNSIDNKVLVSSASN

SEQ ID NO: 263 - protein, 27 aa, Artificial Sequence
  Synthetic peptide
DIDHIIPQAYTKDNSLDNRVLVSNITN

SEQ ID NO: 264 - protein, 27 aa, Artificial Sequence
  Synthetic peptide
DIDHIVPQSFITDNSIDNLVLTSSAGN

SEQ ID NO: 265 - protein, 27 aa, Artificial Sequence
  Synthetic peptide
DVDHIVPQSFLKDDSIDNKVLTRSDKN

SEQ ID NO: 266 - protein, 27 aa, Artificial Sequence
  Synthetic peptide
NIDHIYPQSMVKDDSLDNKVLVQSEIN

SEQ ID NO: 267 - protein, 27 aa, Artificial Sequence
  Synthetic peptide
DIDHILPQSLIKDDSLDNRVLVNATIN

SEQ ID NO: 268 - protein, 27 aa, Artificial Sequence
  Synthetic peptide
DIDHILPQSFIKDDSLENRVLVKKAVN

SEQ ID NO: 269 - protein, 27 aa, Artificial Sequence
  Synthetic peptide
EVDHIFPRSFIKDDSIDNKVLVIKKMN

SEQ ID NO: 270 - protein, 27 aa, Artificial Sequence
  Synthetic peptide
EVDHIIPRSYIKDDSFENKVLVYREEN

SEQ ID NO: 271 - protein, 27 aa, Artificial Sequence
  Synthetic peptide
DIDHIIPQAVTQNDSIDNRVLVARAEN

SEQ ID NO: 272 - protein, 27 aa, Artificial Sequence
  Synthetic peptide
DIDHIVPRSISFDDSFSNLVIVNKLDN

SEQ ID NO: 273 - protein, 27 aa, Artificial Sequence
  Synthetic peptide
EIDHIIPYSISFDDSSSNKLLVLAESN

SEQ ID NO: 274 - protein, 27 aa, Artificial Sequence
  Synthetic peptide
EIDHIIPYSLCFDDSSANKVLVHKQSN

SEQ ID NO: 275 - protein, 27 aa, Artificial Sequence
  Synthetic peptide
EIDHIIPISISLDDSINNKVLVLSKAN

SEQ ID NO: 276 - protein, 27 aa, Artificial Sequence
  Synthetic peptide
EVDHIIPISISLDDSITNKVLVTHREN

SEQ ID NO: 277 - protein, 27 aa, Artificial Sequence
  Synthetic peptide
EVDHILPLSITFDDSLANKVLVYATAN

SEQ ID NO: 278 - protein, 27 aa, Artificial Sequence
  Synthetic peptide
EIDHIIPRSISFDDARSNKVLVYRSEN

SEQ ID NO: 279 - protein, 27 aa, Artificial Sequence
  Synthetic peptide
EVDHIIPRSVSFDNSYHNKVLVKQSEN

SEQ ID NO: 280 - protein, 27 aa, Artificial Sequence
  Synthetic peptide
EVDHIIPYSISWDDSYTNKVLTSAKCN

SEQ ID NO: 281 - protein, 27 aa, Artificial Sequence
  Synthetic peptide
DIDHIIPYSRSMDDSYSNKVLVLSGEN

SEQ ID NO: 282 - protein, 27 aa, Artificial Sequence
  Synthetic peptide
EIEHIIPYSMSYDNSQANKILTEKAEN

SEQ ID NO: 283 - protein, 27 aa, Artificial Sequence
  Synthetic peptide
EVDHIVPYSLILDNTINNKALVYAEEN

SEQ ID NO: 284 - protein, 27 aa, Artificial Sequence
  Synthetic peptide
EIDHVIPYSKSADDSWFNKLLVKKSTN

SEQ ID NO: 285 - protein, 27 aa, Artificial Sequence
  Synthetic peptide
EMDHILPYSRSLDNGWHNRVLVHGKDN

SEQ ID NO: 286 - protein, 27 aa, Artificial Sequence
  Synthetic peptide
EIEHVIPQSLYFDDSFSNKVICEAEVN

SEQ ID NO: 287 - protein, 27 aa, Artificial Sequence
  Synthetic peptide
DIEHIIPQARLFDDSFSNKTLEARSVN

SEQ ID NO: 288 - protein, 27 aa, Artificial Sequence
  Synthetic peptide
EIEHIVPKARVFDDSFSNKTLTFHRIN

SEQ ID NO: 289 - protein, 28 aa, Artificial Sequence
  Synthetic peptide
DKDHIIPQSMKKDDSIINNLVLVNKNAN

SEQ ID NO: 290 - protein, 27 aa, Artificial Sequence
  Synthetic peptide
QVDHILPWSRFGDDSYLNKTLCTARSN

SEQ ID NO: 291 - protein, 27 aa, Artificial Sequence
  Synthetic peptide
DIDHVIPLARGGRDSLDNMVLCQSDAN

SEQ ID NO: 292 - protein, 27 aa, Artificial Sequence
  Synthetic peptide
DMEHTIPKSISFDNSDQNLTLCESYYN

SEQ ID NO: 293 - protein, 27 aa, Artificial Sequence
  Synthetic peptide
DIEHTIPRSAGGDSTKMNLTLCSSRFN

SEQ ID NO: 294 - protein, 27 aa, Artificial Sequence
  Synthetic peptide
DIEHTIPRSISQDNSQMNKTLCSLKFN

SEQ ID NO: 295 - protein, 27 aa, Artificial Sequence
  Synthetic peptide
DIEHLFPIAESEDNGRNNLVISHSACN

SEQ ID NO: 296 - protein, 27 aa, Artificial Sequence
  Synthetic peptide
DVDHIFPRDDTADNSYGNKVVAHRQCN

SEQ ID NO: 297 - protein, 27 aa, Artificial Sequence
  Synthetic peptide
DIEHIVPQSLGGLSTDYNTIVTLKSVN

SEQ ID NO: 298 - protein, 27 aa, Artificial Sequence
  Synthetic peptide
ELDHIVPRTDGGSNRHENLAITCGACN

SEQ ID NO: 299 - protein, 28 aa, Artificial Sequence
  Synthetic peptide
EMDHIVPRKGVGSTNTRTNFAAVCAECN

SEQ ID NO: 300 - protein, 28 aa, Artificial Sequence
  Synthetic peptide
EMDHIVPRKGVGSTNTRVNLAAACAACN

SEQ ID NO: 301 - protein, 28 aa, Artificial Sequence
  Synthetic peptide
EMDHIVPRAGQGSTNTRENLVAVCHRCN

SEQ ID NO: 302 - protein, 27 aa, Artificial Sequence
  Synthetic peptide
ELEHIVPHSFRQSNALSSLVLTWPGVN

SEQ ID NO: 303 - DNA, 3333 bp, Artificial Sequence
  Synthetic polynucleotide
atggtgcctaagaagaagagaaaggtggctgccttcaaacctaattcaatcaactacatcctcggcctcgatatcggcatcgcatccgtcggctgggcgatggtagaaattgacgaagaagaaaaccccatccgcctgattgatttgggcgtgcgcgtatttgagcgtgccgaagtaccgaaaacaggcgactcccttgccatggcaaggcgtttggcgcgcagtgttcgccgcctgacccgccgtcgcgcccaccgcctgcttcggacccgccgcctattgaaacgcgaaggcgtattacaagccgccaattttgacgaaaacggcttgattaaatccttaccgaatacaccatggcaacttcgcgcagccgcattagaccgcaaactgacgcctttagagtggtcggcagtcttgttgcatttaatcaaacatcgcggctatttatcgcaacggaaaaacgagggcgaaactgccgataaggagcttggcgctttgcttaaaggcgtagccggcaatgcccatgccttacagacaggcgatttccgcacaccggccgaattggctttaaataaatttgagaaagaaagcggccatatccgcaatcagcgcagcgattattcgcatacgttcagccgcaaagatttacaggcggagctgattttgctgtttgaaaaacaaaaagaatttggcaatccgcatgtttcaggcggccttaaagaaggtattgaaaccctactgatgacgcaacgccctgccctgtccggcgatgccgttcaaaaaatgttggggcattgcaccttcgaaccggcagagccgaaagccgctaaaaacacctacacagccgaacgtttcatctggctgaccaagctgaacaacctgcgtattttagagcaaggcagcgagcggccattgaccgataccgaacgcgccacgcttatggacgagccatacagaaaatccaaactgacttacgcacaagcccgtaagctgctgggtttagaagataccgcctttttcaaaggcttgcgctatggtaaagacaatgccgaagcctcaacattgatggaaatgaaggcctaccatgccatcagccgtgcactggaaaaagaaggattgaaagacaaaaaatccccattaaacctttctcccgaattacaagacgaaatcggcacggcattctccctgttcaaaaccgatgaagacattacaggccgtctgaaagaccgtatacagcccgaaatcttagaagcgctgttgaaacacatcagcttcgataagttcgtccaaatttccttgaaagcattgcgccgaattgtgcctctaatggaacaaggcaaacgttacgatgaagcctgcgccgaaatctacggagaccattacggcaagaagaatacggaagaaaagatttatctgccgccgattcccgccgacgaaatccgcaaccccgtcgtcttgcgcgccttatctcaagcacgtaaggtcattaacggcgtggtacgccgttacggctccccagctcgtatccatattgaaactgcaagggaagtaggtaaatcgtttaaagaccgcaaagaaattgagaaacgccaagaagaaaaccgcaaagaccgggaaaaagccgccgccaaattccgagagtatttccccaattttgtcggagaacccaaatccaaagatattctgaaactgcgcctgtacgagcaacaacacggcaaatgcctgtattcgggcaaagaaatcaacttaggccgtctgaacgaaaaaggctatgtcgaaatcgaccatgccctgccgttctcgcgcacatgggacgacagtttcaacaataaagtactggtattgggcagcgaaaaccaaaacaaaggcaatcaaaccccttacgaatacttcaacggcaaagacaacagccgcgaatggcaggaatttaaagcgcgtgtcgaaaccagccgtttcccgcgcagtaaaaaacaacggattctgctgcaaaaattcgatgaagacggctttaaagaacgcaatctgaacgacacgcgctacgtcaaccgtttcctgtgtcaatttgttgccgaccgtatgcggctgacaggtaaaggcaagaaacgtgtctttgcatccaacggacaaattaccaatctgttgcgcggcttttggggattgcgcaaagtgcgtgcggaaaacgaccgccatcacgccttggacgccgtcgtcgttgcctgctcgaccgttgccatgcagcagaaaattacccgttttgtacgctataaagagatgaacgcgtttgacggtaaaaccatagacaaagaaacaggagaagtgctgcatcaaaaaacacacttcccacaaccttgggaatttttcgcacaagaagtcatgattcgcgtcttcggcaaaccggacggcaaacccgaattcgaagaagccgataccctagaaaaactgcgcacgttgcttgccgaaaaattatcatctcgccccgaagccgtacacgaatacgttacgccactgtttgtttcacgcgcgcccaatcggaagatgagcgggcaagggcatatggagaccgtcaaatccgccaaacgactggacgaaggcgtcagcgtgttgcgcgtaccgctgacacagttaaaactgaaagacttggaaaaaatggtcaatcgggagcgcgaacctaagctatacgaagcactgaaagcacggctggaagcacataaagacgatcctgccaaagcctttgccgagccgttttacaaatacgataaagcaggcaaccgcacccaacaggtaaaagccgtacgcgtagagcaagtacagaaaaccggcgtatgggtgcgcaaccataacggtattgccgacaacgcaaccatggtgcgcgtagatgtgtttgagaaaggcgacaagtattatctggtaccgatttacagttggcaggtagcgaaagggattttgccggatagggctgttgtacaaggaaaagatgaagaagattggcaacttattgatgatagtttcaactttaaattctcattacaccctaatgatttagtcgaggttataacaaaaaaagctagaatgtttggttactttgccagctgccatcgaggcacaggtaatatcaatatacgcattcatgatcttgatcataaaattggcaaaaatggaatactggaaggtatcggcgtcaaaaccgccctttcattccaaaaataccaaattgacgaactgggcaaagaaatcagaccatgccgtctgaaaaaacgcccgcctgtccgttacccatacgatgttccagattacgctgcagctccagcagcgaagaaaaagaagctggattaa

SEQ ID NO: 304 - protein, 1053 aa, Staphylococcus aureus; identical to SEQ ID NO: 26

SEQ ID NO: 305 - protein, 1368 aa, Streptococcus pyogenes [sequence omitted]

SEQ ID NO: 306 - protein, 984 aa, Campylobacter jejuni
MARILAFDIGISSIGWAFSENDELKDCGVRIFTKVENPKTGESLALPRRLARSARKRLARRKARLNHLKHLIANEFKLNYEDYQSFDESLAKAYKGSLISPYELRFRALNELLSKQDFARVILHIAKRRGYDDIKNSDDKEKGAILKAIKQNEEKLANYQSVGEYLYKEYFQKFKENSKEFTNVRNKKESYERCIAQSFLKDELKLIFKKQREFGFSFSKKFEEEVLSVAFYKRALKDFSHLVGNCSFFTDEKRAPKNSPLAFMFVALTRIINLLNNLKNTEGILYTKDDLNALLNEVLKNGTLTYKQTKKLLGLSDDYEFKGEKGTYFIEFKKYKEFIKALGEHNLSQDDLNEIAKDITLIKDEIKLKKALAKYDLNQNQIDSLSKLEFKDHLNISFKALKLVTPLMLEGKKYDEACNELNLKVAINEDKKDFLPAFNETYYKDEVTNPVVLRAIKEYRKVLNALLKKYGKVHKINIELAREVGKNHSQRAKIEKEQNENYKAKKDAELECEKLGLKINSKNILKLRLFKEQKEFCAYSGEKIKISDLQDEKMLEIDHIYPYSRSFDDSYMNKVLVFTKQNQEKLNQTPFEAFGNDSAKWQKIEVLAKNLPTKKQKRILDKNYKDKEQKNFKDRNLNDTRYIARLVLNYTKDYLDFLPLSDDENTKLNDTQKGSKVHVEAKSGMLTSALRHTWGFSAKDRNNHLHHAIDAVIIAYANNSIVKAFSDFKKEQESNSAELYAKKISELDYKNKRKFFEPFSGFRQKVLDKIDEIFVSKPERKKPSGALHEETFRKEEEFYQSYGGKEGVLKALELGKIRKVNGKIVKNGDMFRVDIFKHKKTNKFYAVPIYTMDFALKVLPNKAVARSKKGEIKDWILMDENYEFCFSLYKDSLILIQTKDMQEPEFVYYNAFTSSTVSLIVSKHDNKFETLSKNQKILFKNANEKEVIAKSIGIQNLKVFEKYIVSALGEVTKAEFRQREDFKK

SEQ ID NO: 307 - protein, 1436 aa, Bacteroides fragilis
MKRILGLDLGTNSIGWALVNEAENKDERSSIVKLGVRVNPLTVDELTNFEKGKSITTNADRTLKRGMRRNLQRYKLRRETLTEVLKEHKLITEDTILSENGNRTTFETYRLRAKAVTEEISLEEFARVLLMINKKRGYKSSRKAKGVEEGTLIDGMDIARELYNNNLTPGELCLQLLDAGKKFLPDFYRSDLQNELDRIWEKQKEYYPEILTDVLKEELRGKKRDAVWAICAKYFVWKENYTEWNKEKGKTEQQEREHKLEGIYSKRKRDEAKRENLQWRVNGLKEKLSLEQLVIVFQEMNTQINNSSGYLGAISDRSKELYFNKQTVGQYQMEMLDKNPNASLRNMVFYRQDYLDEFNMLWEKQAVYHKELTEELKKEIRDIIIFYQRRLKSQKGLIGFCEFESRQIEVDIDGKKKIKTVGNRVISRSSPLFQEFKIWQILNNIEVTVVGKKRKRRKLKENYSALFEELNDAEQLELNGSRRLCQEEKELLAQELFIRDKMTKSEVLKLLFDNPQELDLNFKTIDGNKTGYALFQAYSKMIEMSGHEPVDFKKPVEKVVEYIKAVFDLLNWNTDILGFNSNEELDNQPYYKLWHLLYSFEGDNTPTGNGRLIQKMTELYGFEKEYATILANVSFQDDYGSLSAKAIHKILPHLKEGNRYDVACVYAGYRHSESSLTREEIANKVLKDRLMLLPKNSLHNPVVEKILNQMVNVINVIIDIYGKPDEIRVELARELKKNAKEREELTKSIAQTTKAHEEYKTLLQTEFGLTNVSRTDILRYKLYKELESCGYKTLYSNTYISREKLFSKEFDIEHIIPQARLFDDSFSNKTLEARSVNIEKGNKTAYDFVKEKFGESGADNSLEHYLNNIEDLFKSGKISKTKYNKLKMAEQDIPDGFIERDLRNTQYIAKKALSMLNEISHRVVATSGSVTDKLREDWQLIDVMKELNWEKYKALGLVEYFEDRDGRQIGRIKDWTKRNDHRHHAMDALTVAFTKDVFIQYFNNKNASLDPNANEHAIKNKYFQNGRAIAPMPLREFRAEAKKHLENTLISIKAKNKVITGNINKTRKKGGVNKNMQQTPRGQLHLETIYGSGKQYLTKEEKVNASFDMRKIGTVSKSAYRDALLKRLYENDNDPKKAFAGKNSLDKQPIWLDKEQMRKVPEKVKIVTLEAIYTIRKEISPDLKVDKVIDVGVRKILIDRLNEYGNDAKKAFSNLDKNPIWLNKEKGISIKRVTISGISNAQSLHVKKDKDGKPILDENGRNIPVDFVNTGNNHHVAVYYRPVIDKRGQLVVDEAGNPKYELEEVVVSFFEAVTRANLGLPIIDKDYKTTEGWQFLFSMKQNEYFVFPNEKTGFNPKEIDLLDVENYGLISPNLFRVQKFSLKNYVFRHHLETTIKDTSSILRGITWIDFRSSKGLDTIVKVRVNHIGQIVSVGEY

SEQ ID NO: 308 - protein, 1420 aa, Bifidobacterium bifidum
MSRKNYVDDYAISLDIGNASVGWSAFTPNYRLVRAKGHELIGVRLFDPADTAESRRMARTTRRRYSRRRWRLRLLDALFDQALSEIDPSFLARRKYSWVHPDDENNADCWYGSVLFDSNEQDKRFYEKYPTIYHLRKALMEDDSQHDIREIYLAIHHMVKYRGNFLVEGTLESSNAFKEDELLKLLGRITRYEMSEGEQNSDIEQDDENKLVAPANGQLADALCATRGSRSMRVDNALEALSAVNDLSREQRAIVKAIFAGLEGNKLDLAKIFVSKEFSSENKKILGIYFNKSDYEEKCVQIVDSGLLDDEEREFLDRMQGQYNAIALKQLLGRSTSVSDSKCASYDAHRANWNLIKLQLRTKENEKDINENYGILVGWKIDSGQRKSVRGESAYENMRKKANVFFKKMIETSDLSETDKNRLIHDIEEDKLFPIQRDSDNGVIPHQLHQNELKQIIKKQGKYYPFLLDAFEKDGKQINKIEGLLTFRVPYFVGPLVVPEDLQKSDNSENHWMVRKKKGEITPWNFDEMVDKDASGRKFIERLVGTDSYLLGEPTLPKNSLLYQEYEVLNELNNVRLSVRTGNHWNDKRRMRLGREEKTLLCQRLFMKGQTVTKRTAENLLRKEYGRTYELSGLSDESKFTSSLSTYGKMCRIFGEKYVNEHRDLMEKIVELQTVFEDKETLLHQLRQLEGISEADCALLVNTHYTGWGRLSRKLLTTKAGECKISDDFAPRKHSIIEIMRAEDRNLMEIITDKQLGFSDWIEQENLGAENGSSLMEVVDDLRVSPKVKRGIIQSIRLIDDISKAVGKRPSRIFLELADDIQPSGRTISRKSRLQDLYRNANLGKEFKGIADELNACSDKDLQDDRLFLYYTQLGKDMYTGEELDLDRLSSAYDIDHIIPQAVTQNDSIDNRVLVARAENARKTDSFTYMPQIADRMRNFWQILLDNGLISRVKFERLTRQNEFSEREKERFVQRSLVETRQIMKNVATLMRQRYGNSAAVIGLNAELTKEMHRYLGFSHKNRDINDYHHAQDALCVGIAGQFAANRGFFADGEVSDGAQNSYNQYLRDYLRGYREKLSAEDRKQGRAFGFIVGSMRSQDEQKRVNPRTGEVVWSEEDKDYLRKVMNYRKMLVTQKVGDDFGALYDETRYAATDPKGIKGIPFDGAKQDTSLYGGFSSAKPAYAVLIESKGKTRLVNVTMQEYSLLGDRPSDDELRKVLAKKKSEYAKANILLRHVPKMQLIRYGGGLMVIKSAGELNNAQQLWLPYEEYCYFDDLSQGKGSLEKDDLKKLLDSILGSVQCLYPWHRFTEEELADLHVAFDKLPEDEKKNVITGIVSALHADAKTANLSIVGMTGSWRRMNNKSGYTFSDEDEFIFQSPSGLFEKRVTVGELKRKAKKEVNSKYRTNEKRLPTLSGASQP

SEQ ID NO: 309 - protein, 1397 aa, Veillonella atypica
METQTSNQLITSHLKDYPKQDYFVGLDIGTNSVGWAVTNTSYELLKFHSHKMWGSRLFEEGESAVTRRGFRSMRRRLERRKLRLKLLEELFADAMAQVDSTFFIRLHESKYHYEDKTTGHSSKHILFIDEDYTDQDYFTEYPTIYHLRKDLMENGTDDIRKLFLAVHHILKYRGNFLYEGATFNSNAFTFEDVLKQALVNITFNCFDTNSAISSISNILMESGKTKSDKAKAIERLVDTYTVFDEVNTPDKPQKEQVKEDKKTLKAFANLVLGLSANLIDLFGSVEDIDDDLKKLQIVGDTYDEKRDELAKVWGDEIHIIDDCKSVYDAIILMSIKEPGLTISQSKVKAFDKHKEDLVILKSLLKLDRNVYNEMFKSDKKGLHNYVHYIKQGRTEETSCSREDFYKYTKKIVEGLADSKDKEYILNEIELQTLLPLQRIKDNGVIPYQLHLEELKVILDKCGPKFPFLHTVSDGFSVTEKLIKMLEFRIPYYVGPLNTHHNIDNGGFSWAVRKQAGRVTPWNFEEKIDREKSAAAFIKNLTNKCTYLFGEDVLPKSSLLYSEFMLLNELNNVRIDGKALAQGVKQHLIDSIFKQDHKKMTKNRIELFLKDNNYITKKHKPEITGLDGEIKNDLTSYRDMVRILGNNFDVSMAEDIITDITIFGESKKMLRQTLRNKFGSQLNDETIKKLSKLRYRDWGRLSKKLLKGIDGCDKAGNGAPKTIIELMRNDSYNLMEILGDKFSFMECIEEENAKLAQGQVVNPHDIIDELALSPAVKRAVWQALRIVDEVAHIKKALPSRIFVEVARTNKSEKKKKDSRQKRLSDLYSAIKKDDVLQSGLQDKEFGALKSGLANYDDAALRSKKLYLYYTQMGRCAYTGNIIDLNQLNTDNYDIDHIYPRSLTKDDSFDNLVLCERTANAKKSDIYPIDNRIQTKQKPFWAFLKHQGLISERKYERLTRIAPLTADDLSGFIARQLVETNQSVKATTTLLRRLYPDIDVVFVKAENVSDFRHNNNFIKVRSLNHHHHAKDAYLNIVVGNVYHEKFTRNFRLFFKKNGANRTYNLAKMFNYDVICTNAQDGKAWDVKTSMNTVKKMMASNDVRVTRRLLEQSGALADATIYKASVAAKAKDGAYIGMKTKYSVFADVTKYGGMTKIKNAYSIIVQYTGKKGEEIKEIVPLPIYLINRNATDIELIDYVKSVIPKAKDISIKYRKLCINQLVKVNGFYYYLGGKTNDKIYIDNAIELVVPHDIATYIKLLDKYDLLRKENKTLKASSITTSIYNINTSTVVSLNKVGIDVFDYFMSKLRTPLYMKMKGNKVDELSSTGRSKFIKMTLEEQSIYLLEVLNLLTNSKTTFDVKPLGITGSRSTIGVKIHNLDEFKIINESITGLYSNEVTIV

SEQ ID NO: 310 - protein, 1363 aa, Lactobacillus rhamnosus
MTKLNQPYGIGLDIGSNSIGFAVVDANSHLLRLKGETAIGARLFREGQSAADRRGSRTTRRRLSRTRWRLSFLRDFFAPHITKIDPDFFLRQKYSEISPKDKDRFKYEKRLFNDRTDAEFYEDYPSMYHLRLHLMTHTHKADPREIFLAIHHILKSRGHFLTPGAAKDFNTDKVDLEDIFPALTEAYAQVYPDLELTFDLAKADDFKAKLLDEQATPSDTQKALVNLLLSSDGEKEIVKKRKQVLTEFAKAITGLKTKFNLALGTEVDEADASNWQFSMGQLDDKWSNIETSMTDQGTEIFEQIQELYRARLLNGIVPAGMSLSQAKVADYGQHKEDLELFKTYLKKLNDHELAKTIRGLYDRYINGDDAKPFLREDFVKALTKEVTAHPNEVSEQLLNRMGQANFMLKQRTKANGAIPIQLQQRELDQIIANQSKYYDWLAAPNPVEAHRWKMPYQLDELLNFHIPYYVGPLITPKQQAESGENVFAWMVRKDPSGNITPYNFDEKVDREASANTFIQRMKTTDTYLIGEDVLPKQSLLYQKYEVLNELNNVRINNECLGTDQKQRLIREVFERHSSVTIKQVADNLVAHGDFARRPEIRGLADEKRFLSSLSTYHQLKEILHEAIDDPTKLLDIENIITWSTVFEDHTIFETKLAEIEWLDPKKINELSGIRYRGWGQFSRKLLDGLKLGNGHTVIQELMLSNHNLMQILADETLKETMTELNQDKLKTDDIEDVINDAYTSPSNKKALRQVLRVVEDIKHAANGQDPSWLFIETADGTGTAGKRTQSRQKQIQTVYANAAQELIDSAVRGELEDKIADKASFTDRLVLYFMQGGRDIYTGAPLNIDQLSHYDIDHILPQSLIKDDSLDNRVLVNATINREKNNVFASTLFAGKMKATWRKWHEAGLISGRKLRNLMLRPDEIDKFAKGFVARQLVETRQIIKLTEQIAAAQYPNTKIIAVKAGLSHQLREELDFPKNRDVNHYHHAFDAFLAARIGTYLLKRYPKLAPFFTYGEFAKVDVKKFREFNFIGALTHAKKNIIAKDTGEIVWDKERDIRELDRIYNFKRMLITHEVYFETADLFKQTIYAAKDSKERGGSKQLIPKKQGYPTQVYGGYTQESGSYNALVRVAEADTTAYQVIKISAQNASKIASANLKSREKGKQLLNEIVVKQLAKRRKNWKPSANSFKIVIPRFGMGTLFQNAKYGLFMVNSDTYYRNYQELWLSRENQKLLKKLFSIKYEKTQMNHDALQVYKAIIDQVEKFFKLYDINQFRAKLSDAIERFEKLPINTDGNKIGKTETLRQILIGLQANGTRSNVKNLGIKTDLGLLQVGSGIKLDKDTQIVYQSPSGLFKRRIPLADL

SEQ ID NO: 311 - protein, 1365 aa, Filifactor alocis
MTKEYYLGLDVGTNSVGWAVTDSQYNLCKFKKKDMWGIRLFESANTAKDRRLQRGNRRRLERKKQRIDLLQEIFSPEICKIDPTFFIRLNESRLHLEDKSNDFKYPLFIEKDYSDIEYYKEFPTIFHLRKHLIESEEKQDIRLIYLALHNIIKTRGHFLIDGDLQSAKQLRPILDTFLLSLQEEQNLSVSLSENQKDEYEEILKNRSIAKSEKVKKLKNLFEISDELEKEEKKAQSAVIENFCKFIVGNKGDVCKFLRVSKEELEIDSFSFSEGKYEDDIVKNLEEKVPEKVYLFEQMKAMYDWNILVDILETEEYISFAKVKQYEKHKTNLRLLRDIILKYCTKDEYNRMFNDEKEAGSYTAYVGKLKKNNKKYWIEKKRNPEEFYKSLGKLLDKIEPLKEDLEVLTMMIEECKNHTLLPIQKNKDNGVIPHQVHEVELKKILENAKKYYSFLTETDKDGYSVVQKIESIFRFRIPYYVGPLSTRHQEKGSNVWMVRKPGREDRIYPWNMEEIIDFEKSNENFITRMTNKCTYLIGEDVLPKHSLLYSKYMVLNELNNVKVRGKKLPTSLKQKVFEDLFENKSKVTGKNLLEYLQIQDKDIQIDDLSGFDKDFKTSLKSYLDFKKQIFGEEIEKESIQNMIEDIIKWITIYGNDKEMLKRVIRANYSNQLTEEQMKKITGFQYSGWGNFSKMFLKGISGSDVSTGETFDIITAMWETDNNLMQILSKKFTFMDNVEDFNSGKVGKIDKITYDSTVKEMFLSPENKRAVWQTIQVAEEIKKVMGCEPKKIFIEMARGGEKVKKRTKSRKAQLLELYAACEEDCRELIKEIEDRDERDFNSMKLFLYYTQFGKCMYSGDDIDINELIRGNSKWDRDHIYPQSKIKDDSIDNLVLVNKTYNAKKSNELLSEDIQKKMHSFWLSLLNKKLITKSKYDRLTRKGDFTDEELSGFIARQLVETRQSTKAIADIFKQIYSSEVVYVKSSLVSDFRKKPLNYLKSRRVNDYHHAKDAYLNIVVGNVYNKKFTSNPIQWMKKNRDTNYSLNKVFEHDVVINGEVIWEKCTYHEDTNTYDGGTLDRIRKIVERDNILYTEYAYCEKGELFNATIQNKNGNSTVSLKKGLDVKKYGGYFSANTSYFSLIEFEDKKGDRARHIIGVPIYIANMLEHSPSAFLEYCEQKGYQNVRILVEKIKKNSLLIINGYPLRIRGENEVDTSFKRAIQLKLDQKNYELVRNIEKFLEKYVEKKGNYPIDENRDHITHEKMNQLYEVLLSKMKKFNKKGMADPSDRIEKSKPKFIKLEDLIDKINVINKMLNLLRCDNDTKADLSLIELPKNAGSFVVKKNTIGKSKIILVNQSVTGLYENRREL

SEQ ID NO: 312 - protein, 1389 aa, Oenococcus kitaharae
MARDYSVGLDIGTSSVGWAAIDNKYHLIRAKSKNLIGVRLFDSAVTAEKRRGYRTTRRRLSRRHWRLRLLNDIFAGPLTDFGDENFLARLKYSWVHPQDQSNQAHFAAGLLFDSKEQDKDFYRKYPTIYHLRLALMNDDQKHDLREVYLAIHHLVKYRGHFLIEGDVKADSAFDVHTFADAIQRYAESNNSDENLLGKIDEKKLSAALTDKHGSKSQRAETAETAFDILDLQSKKQIQAILKSVVGNQANLMAIFGLDSSAISKDEQKNYKFSFDDADIDEKIADSEALLSDTEFEFLCDLKAAFDGLTLKMLLGDDKTVSAAMVRRFNEHQKDWEYIKSHIRNAKNAGNGLYEKSKKFDGINAAYLALQSDNEDDRKKAKKIFQDEISSADIPDDVKADFLKKIDDDQFLPIQRTKNNGTIPHQLHRNELEQIIEKQGIYYPFLKDTYQENSHELNKITALINFRVPYYVGPLVEEEQKIADDGKNIPDPTNHWMVRKSNDTITPWNLSQVVDLDKSGRRFIERLTGTDTYLIGEPTLPKNSLLYQKFDVLQELNNIRVSGRRLDIRAKQDAFEHLFKVQKTVSATNLKDFLVQAGYISEDTQIEGLADVNGKNFNNALTTYNYLVSVLGREFVENPSNEELLEEITELQTVFEDKKVLRRQLDQLDGLSDHNREKLSRKHYTGWGRISKKLLTTKIVQNADKIDNQTFDVPRMNQSIIDTLYNTKMNLMEIINNAEDDFGVRAWIDKQNTTDGDEQDVYSLIDELAGPKEIKRGIVQSFRILDDITKAVGYAPKRVYLEFARKTQESHLTNSRKNQLSTLLKNAGLSELVTQVSQYDAAALQNDRLYLYFLQQGKDMYSGEKLNLDNLSNYDIDHIIPQAYTKDNSLDNRVLVSNITNRRKSDSSNYLPALIDKMRPFWSVLSKQGLLSKHKFANLTRTRDFDDMEKERFIARSLVETRQIIKNVASLIDSHFGGETKAVAIRSSLTADMRRYVDIPKNRDINDYHHAFDALLFSTVGQYTENSGLMKKGQLSDSAGNQYNRYIKEWIHAARLNAQSQRVNPFGFVVGSMRNAAPGKLNPETGEITPEENADWSIADLDYLHKVMNFRKITVTRRLKDQKGQLYDESRYPSVLHDAKSKASINFDKHKPVDLYGGFSSAKPAYAALIKFKNKFRLVNVLRQWTYSDKNSEDYILEQIRGKYPKAEMVLSHIPYGQLVKKDGALVTISSATELHNFEQLWLPLADYKLINTLLKTKEDNLVDILHNRLDLPEMTIESAFYKAFDSILSFAFNRYALHQNALVKLQAHRDDFNALNYEDKQQTLERILDALHASPASSDLKKINLSSGFGRLFSPSHFTLADTDEFIFQSVTGLFSTQKTVAQLYQETK

SEQ ID NO: 313 - protein, 1323 aa, Fructobacillus fructosus
MVYDVGLDIGTGSVGWVALDENGKLARAKGKNLVGVRLFDTAQTAADRRGFRTTRRRLSRRKWRLRLLDELFSAEINEIDSSFFQRLKYSYVHPKDEENKAHYYGGYLFPTEEETKKFHRSYPTIYHLRQELMAQPNKRFDIREIYLAIHHLVKYRGHFLSSQEKITIGSTYNPEDLANAIEVYADEKGLSWELNNPEQLTEIISGEAGYGLNKSMKADEALKLFEFDNNQDKVAIKTLLAGLTGNQIDFAKLFGKDISDKDEAKLWKLKLDDEALEEKSQTILSQLTDEEIELFHAVVQAYDGFVLIGLLNGADSVSAAMVQLYDQHREDRKLLKSLAQKAGLKHKRFSEIYEQLALATDEATIKNGISTARELVEESNLSKEVKEDTLRRLDENEFLPKQRTKANSVIPHQLHLAELQKILQNQGQYYPFLLDTFEKEDGQDNKIEELLRFRIPYYVGPLVTKKDVEHAGGDADNHWVERNEGFEKSRVTPWNFDKVFNRDKAARDFIERLTGNDTYLIGEKTLPQNSLRYQLFTVLNELNNVRVNGKKFDSKTKADLINDLFKARKTVSLSALKDYLKAQGKGDVTITGLADESKFNSSLSSYNDLKKTFDAEYLENEDNQETLEKIIEIQTVFEDSKIASRELSKLPLDDDQVKKLSQTHYTGWGRLSEKLLDSKIIDERGQKVSILDKLKSTSQNFMSIINNDKYGVQAWITEQNTGSSKLTFDEKVNELTTSPANKRGIKQSFAVLNDIKKAMKEEPRRVYLEFAREDQTSVRSVPRYNQLKEKYQSKSLSEEAKVLKKTLDGNKNKMSDDRYFLYFQQQGKDMYTGRPINFERLSQDYDIDHIIPQAFTKDDSLDNRVLVSRPENARKSDSFAYTDEVQKQDGSLWTSLLKSGFINRKKYERLTKAGKYLDGQKTGFIARQLVETRQIIKNVASLIEGEYENSKAVAIRSEITADMRLLVGIKKHREINSFHHAFDALLITAAGQYMQNRYPDRDSTNVYNEFDRYTNDYLKNLRQLSSRDEVRRLKSFGFVVGTMRKGNEDWSEENTSYLRKVMMFKNILTTKKTEKDRGPLNKETIFSPKSGKKLIPLNSKRSDTALYGGYSNVYSAYMTLVRANGKNLLIKIPISIANQIEVGNLKINDYIVNNPAIKKFEKILISKLPLGQLVNEDGNLIYLASNEYRHNAKQLWLSTTDADKIASISENSSDEELLEAYDILTSENVKNRFPFFKKDIDKLSQVRDEFLDSDKRIAVIQTILRGLQIDAAYQAPVKIISKKVSDWHKLQQSGGIKLSDNSEMIYQSATGIFETRVKISDLL

SEQ ID NO: 314 - protein, 1329 aa, Catenibacterium mitsuokai
IVDYCIGLDLGTGSVGWAVVDMNHRLMKRNGKHLWGSRLFSNAETAANRRASRSIRRRYNKRRERIRLLRAILQDMVLEKDPTFFIRLEHTSFLDEEDKAKYLGTDYKDNYNLFIDEDFNDYTYYHKYPTIYHLRKALCESTEKADPRLIYLALHHIVKYRGNFLYEGQKFNMDASNIEDKLSDIFTQFTSFNNIPYEDDEKKNLEILEILKKPLSKKAKVDEVMTLIAPEKDYKSAFKELVTGIAGNKMNVTKMILCEPIKQGDSEIKLKFSDSNYDDQFSEVEKDLGEYVEFVDALHNVYSWVELQTIMGATHTDNASISEAMVSRYNKHHDDLKLLKDCIKNNVPNKYFDMFRNDSEKSKGYYNYINRPSKAPVDEFYKYVKKCIEKVDTPEAKQILNDIELENFLLKQNSRTNGSVPYQMQLDEMIKIIDNQAEYYPILKEKREQLLSILTFRIPYYFGPLNETSEHAWIKRLEGKENQRILPWNYQDIVDVDATAEGFIKRMRSYCTYFPDEEVLPKNSLIVSKYEVYNELNKIRVDDKLLEVDVKNDIYNELFMKNKTVTEKKLKNWLVNNQCCSKDAEIKGFQKENQFSTSLTPWIDFTNIFGKIDQSNFDLIENIIYDLTVFEDKKIMKRRLKKKYALPDDKVKQILKLKYKDWSRLSKKLLDGIVADNRFGSSVTVLDVLEMSRLNLMEIINDKDLGYAQMIEEATSCPEDGKFTYEEVERLAGSPALKRGIWQSLQIVEEITKVMKCRPKYIYIEFERSEEAKERTESKIKKLENVYKDLDEQTKKEYKSVLEELKGFDNTKKISSDSLFLYFTQLGKCMYSGKKLDIDSLDKYQIDHIVPQSLVKDDSFDNRVLVVPSENQRKLDDLVVPFDIRDKMYRFWKLLFDHELISPKKFYSLIKTEYTERDEERFINRQLVETRQITKNVTQIIEDHYSTTKVAAIRANLSHEFRVKNHIYKNRDINDYHHAHDAYIVALIGGFMRDRYPNMHDSKAVYSEYMKMFRKNKNDQKRWKDGFVINSMNYPYEVDGKLIWNPDLINEIKKCFYYKDCYCTTKLDQKSGQLFNLTVLSNDAHADKGVTKAVVPVNKNRSDVHKYGGFSGLQYTIVAIEGQKKKGKKTELVKKISGVPLHLKAASINEKINYIEEKEGLSDVRIIKDNIPVNQMIEMDGGEYLLTSPTEYVNARQLVLNEKQCALIADIYNAIYKQDYDNLDDILMIQLYIELTNKMKVLYPAYRGIAEKFESMNENYVVISKEEKANIIKQMLIVMHRGPQNGNIVYDDFKISDRIGRLKTKNHNLNNIVFISQSPTGIYTKKYKL

SEQ ID NO: 315 - protein, 1348 aa, Finegoldia magna
MKSEKKYYIGLDVGTNSVGWAVTDEFYNILRAKGKDLWGVRLFEKADTAANTRIFRSGRRRNDRKGMRLQILREIFEDEIKKVDKDFYDRLDESKFWAEDKKVSGKYSLFNDKNFSDKQYFEKFPTIFHLRKYLMEEHGKVDIRYYFLAINQMMKRRGHFLIDGQISHVTDDKPLKEQLILLINDLLKIELEEELMDSIFEILADVNEKRTDKKNNLKELIKGQDFNKQEGNILNSIFESIVTGKAKIKNIISDEDILEKIKEDNKEDFVLTGDSYEENLQYFEEVLQENITLFNTLKSTYDFLILQSILKGKSTLSDAQVERYDEHKKDLEILKKVIKKYDEDGKLFKQVFKEDNGNGYVSYIGYYLNKNKKITAKKKISNIEFTKYVKGILEKQCDCEDEDVKYLLGKIEQENFLLKQISSINSVIPHQIHLFELDKILENLAKNYPSFNNKKEEFTKIEKIRKTFTFRIPYYVGPLNDYHKNNGGNAWIFRNKGEKIRPWNFEKIVDLHKSEEEFIKRMLNQCTYLPEETVLPKSSILYSEYMVLNELNNLRINGKPLDTDVKLKLIEELFKKKTKVTLKSIRDYMVRNNFADKEDFDNSEKNLEIASNMKSYIDFNNILEDKFDVEMVEDLIEKITIHTGNKKLLKKYIEETYPDLSSSQIQKIINLKYKDWGRLSRKLLDGIKGTKKETEKTDTVINFLRNSSDNLMQIIGSQNYSFNEYIDKLRKKYIPQEISYEVVENLYVSPSVKKMIWQVIRVTEEITKVMGYDPDKIFIEMAKSEEEKKTTISRKNKLLDLYKAIKKDERDSQYEKLLTGLNKLDDSDLRSRKLYLYYTQMGRDMYTGEKIDLDKLFDSTHYDKDHIIPQSMKKDDSIINNLVLVNKNANQTTKGNIYPVPSSIRNNPKIYNYWKYLMEKEFISKEKYNRLIRNTPLTNEELGGFINRQLVETRQSTKAIKELFEKFYQKSKIIPVKASLASDLRKDMNTLKSREVNDLHHAHDAFLNIVAGDVWNREFTSNPINYVKENREGDKVKYSLSKDFTRPRKSKGKVIWTPEKGRKLIVDTLNKPSVLISNESHVKKGELFNATIAGKKDYKKGKIYLPLKKDDRLQDVSKYGGYKAINGAFFFLVEHTKSKKRIRSIELFPLHLLSKFYEDKNTVLDYAINVLQLQDPKIIIDKINYRTEIIIDNFSYLISTKSNDGSITVKPNEQMYWRVDEISNLKKIENKYKKDAILTEEDRKIMESYIDKIYQQFKAGKYKNRRTTDTIIEKYEIIDLDTLDNKQLYQLLVAFISLSYKTSNNAVDFTVIGLGTECGKPRITNLPDNTYLVYKSITGIYEKRIRIK

SEQ ID NO: 316 - protein, 1384 aa, Coriobacterium glomerans
MKLRGIEDDYSIGLDMGTSSVGWAVTDERGTLAHFKRKPTWGSRLFREAQTAAVARMPRGQRRRYVRRRWRLDLLQKLFEQQMEQADPDFFIRLRQSRLLRDDRAEEHADYRWPLFNDCKFTERDYYQRFPTIYHVRSWLMETDEQADIRLIYLALHNIVKHRGNFLREGQSLSAKSARPDEALNHLRETLRVWSSERGFECSIADNGSILAMLTHPDLSPSDRRKKIAPLFDVKSDDAAADKKLGIALAGAVIGLKTEFKNIFGDFPCEDSSIYLSNDEAVDAVRSACPDDCAELFDRLCEVYSAYVLQGLLSYAPGQTISANMVEKYRRYGEDLALLKKLVKIYAPDQYRMFFSGATYPGTGIYDAAQARGYTKYNLGPKKSEYKPSESMQYDDFRKAVEKLFAKTDARADERYRMMMDRFDKQQFLRRLKTSDNGSIYHQLHLEELKAIVENQGRFYPFLKRDADKLVSLVSFRIPYYVGPLSTRNARTDQHGENRFAWSERKPGMQDEPIFPWNWESIIDRSKSAEKFILRMTGMCTYLQQEPVLPKSSLLYEEFCVLNELNGAHWSIDGDDEHRFDAADREGIIEELFRRKRTVSYGDVAGWMERERNQIGAHVCGGQGEKGFESKLGSYIFFCKDVFKVERLEQSDYPMIERIILWNTLFEDRKILSQRLKEEYGSRLSAEQIKTICKKRFTGWGRLSEKFLTGITVQVDEDSVSIMDVLREGCPVSGKRGRAMVMMEILRDEELGFQKKVDDFNRAFFAENAQALGVNELPGSPAVRRSLNQSIRIVDEIASIAGKAPANIFIEVTRDEDPKKKGRRTKRRYNDLKDALEAFKKEDPELWRELCETAPNDMDERLSLYFMQRGKCLYSGRAIDIHQLSNAGIYEVDHIIPRTYVKDDSLENKALVYREENQRKTDMLLIDPEIRRRMSGYWRMLHEAKLIGDKKFRNLLRSRIDDKALKGFIARQLVETGQMVKLVRSLLEARYPETNIISVKASISHDLRTAAELVKCREANDFHHAHDAFLACRVGLFIQKRHPCVYENPIGLSQVVRNYVRQQADIFKRCRTIPGSSGFIVNSFMTSGFDKETGEIFKDDWDAEAEVEGIRRSLNFRQCFISRMPFEDHGVFWDATIYSPRAKKTAALPLKQGLNPSRYGSFSREQFAYFFIYKARNPRKEQTLFEFAQVPVRLSAQIRQDENALERYARELAKDQGLEFIRIERSKILKNQLIEIDGDRLCITGKEEVRNACELAFAQDEMRVIRMLVSEKPVSRECVISLFNRILLHGDQASRRLSKQLKLALLSEAFSEASDNVQRNVVLGLIAIFNGSTNMVNLSDIGGSKFAGNVRIKYKKELASPKVNVHLIDQSVTGMFERRTKIGL

SEQ ID NO: 317 - protein, 1391 aa, Eubacterium yurii
MENKQYYIGLDVGTNSVGWAVTDTSYNLLRAKGKDMWGARLFEKANTAAERRTKRTSRRRSEREKARKAMLKELFADEINRVDPSFFIRLEESKFFLDDRSENNRQRYTLFNDATFTDKDYYEKYKTIFHLRSALINSDEKFDVRLVFLAILNLFSHRGHFLNASLKGDGDIQGMDVFYNDLVESCEYFEIELPRITNIDNFEKILSQKGKSRTKILEELSEELSISKKDKSKYNLIKLISGLEASVVELYNIEDIQDENKKIKIGFRESDYEESSLKVKEIIGDEYFDLVERAKSVHDMGLLSNIIGNSKYLCEARVEAYENHHKDLLKIKELLKKYDKKAYNDMFRKMTDKNYSAYVGSVNSNIAKERRSVDKRKIEDLYKYIEDTALKNIPDDNKDKIEILEKIKLGEFLKKQLTASNGVIPNQLQSRELRAILKKAENYLPFLKEKGEKNLTVSEMIIQLFEFQIPYYVGPLDKNPKKDNKANSWAKIKQGGRILPWNFEDKVDVKGSRKEFIEKMVRKCTYISDEHTLPKQSLLYEKFMVLNEINNIKIDGEKISVEAKQKIYNDLFVKGKKVSQKDIKKELISLNIMDKDSVLSGTDTVCNAYLSSIGKFTGVFKEEINKQSIVDMIEDIIFLKTVYGDEKRFVKEEIVEKYGDEIDKDKIKRILGFKFSNWGNLSKSFLELEGADVGTGEVRSIIQSLWETNFNLMELLSSRFTYMDELEKRVKKLEKPLSEWTIEDLDDMYLSSPVKRMIWQSMKIVDEIQTVIGYAPKRIFVEMTRSEGEKVRTKSRKDRLKELYNGIKEDSKQWVKELDSKDESYFRSKKMYLYYLQKGRCMYSGEVIELDKLMDDNLYDIDHIYPRSFVKDDSLDNLVLVKKEINNRKQNDPITPQIQASCQGFWKILHDQGFMSNEKYSRLTRKTQEFSDEEKLSFINRQIVETGQATKCMAQILQKSMGEDVDVVFSKARLVSEFRHKFELFKSRLINDFHHANDAYLNIVVGNSYFVKFTRNPANFIKDARKNPDNPVYKYHMDRFFERDVKSKSEVAWIGQSEGNSGTIVIVKKTMAKNSPLITKKVEEGHGSITKETIVGVKEIKFGRNKVEKADKTPKKPNLQAYRPIKTSDERLCNILRYGGRTSISISGYCLVEYVKKRKTIRSLEAIPVYLGRKDSLSEEKLLNYFRYNLNDGGKDSVSDIRLCLPFISTNSLVKIDGYLYYLGGKNDDRIQLYNAYQLKMKKEEVEYIRKIEKAVSMSKFDEIDREKNPVLTEEKNIELYNKIQDKFENTVFSKRMSLVKYNKKDLSFGDFLKNKKSKFEEIDLEKQCKVLYNIIFNLSNLKEVDLSDIGGSKSTGKCRCKKNITNYKEFKLIQQSITGLYSCEKDLMTI

SEQ ID NO: 318 - protein, 1364 aa, Peptoniphilus duerdenii
MKNLKEYYIGLDIGTASVGWAVTDESYNIPKFNGKKMWGVRLFDDAKTAEERRTQRGSRRRLNRRKERINLLQDLFATEISKVDPNFFLRLDNSDLYREDKDEKLKSKYTLFNDKDFKDRDYHKKYPTIHHLIMDLIEDEGKKDIRLLYLACHYLLKNRGHFIFEGQKFDTKNSFDKSINDLKIHLRDEYNIDLEFNNEDLIEIITDTTLNKTNKKKELKNIVGDTKFLKAISAIMIGSSQKLVDLFEDGEFEETTVKSVDFSTTAFDDKYSEYEEALGDTISLLNILKSIYDSSILENLLKDADKSKDGNKYISKAFVKKFNKHGKDLKTLKRIIKKYLPSEYANIFRNKSINDNYVAYTKSNITSNKRTKASKFTKQEDFYKFIKKHLDTIKETKLNSSENEDLKLIDEMLTDIEFKTFIPKLKSSDNGVIPYQLKLMELKKILDNQSKYYDFLNESDEYGTVKDKVESIMEFRIPYYVGPLNPDSKYAWIKRENTKITPWNFKDIVDLDSSREEFIDRLIGRCTYLKEEKVLPKASLIYNEFMVLNELNNLKLNEFLITEEMKKAIFEELFKTKKKVTLKAVSNLLKKEFNLTGDILLSGTDGDFKQGLNSYIDFKNIIGDKVDRDDYRIKIEEIIKLIVLYEDDKTYLKKKIKSAYKNDFTDDEIKKIAALNYKDWGRLSKRFLTGIEGVDKTTGEKGSIIYFMREYNLNLMELMSGHYTFTEEVEKLNPVENRELCYEMVDELYLSPSVKRMLWQSLRVVDEIKRIIGKDPKKIFIEMARAKEAKNSRKESRKNKLLEFYKFGKKAFINEIGEERYNYLLNEINSEEESKFRWDNLYLYYTQLGRCMYSLEPIDLADLKSNNIYDQDHIYPKSKIYDDSLENRVLVKKNLNHEKGNQYPIPEKVLNKNAYGFWKILFDKGLIGQKKYTRLTRRTPFEERELAEFIERQIVETRQATKETANLLKNICQDSEIVYSKAENASRFRQEFDIIKCRTVNDLHHMHDAYLNIVVGNVYNTKFTKNPLNFIKDKDNVRSYNLENMFKYDVVRGSYTAWIADDSEGNVKAATIKKVKRELEGKNYRFTRMSYIGTGGLYDQNLMRKGKGQIPQKENTNKSNIEKYGGYNKASSAYFALIESDGKAGRERTLETIPIMVYNQEKYGNTEAVDKYLKDNLELQDPKILKDKIKINSLIKLDGFLYNIKGKTGDSLSIAGSVQLIVNKEEQKLIKKMDKFLVKKKDNKDIKVTSFDNIKEEELIKLYKTLSDKLNNGIYSNKRNNQAKNISEALDKFKEISIEEKIDVLNQIILLFQSYNNGCNLKSIGLSAKTGVVFIPKKLNYKECKLINQSITGLFENEVDLLNL

SEQ ID NO: 319 - protein, 1358 aa, Acidaminococcus sp.
MGKMYYLGLDIGTNSVGYAVTDPSYHLLKFKGEPMWGAHVFAAGNQSAERRSFRTSRRRLDRRQQRVKLVQEIFAPVISPIDPRFFIRLHESALWRDDVAETDKHIFFNDPTYTDKEYYSDYPTIHHLIVDLMESSEKHDPRLVYLAVAWLVAHRGHFLNEVDKDNIGDVLSFDAFYPEFLAFLSDNGVSPWVCESKALQATLLSRNSVNDKYKALKSLIFGSQKPEDNFDANISEDGLIQLLAGKKVKVNKLFPQESNDASFTLNDKEDAIEEILGTLTPDECEWIAHIRRLFDWAIMKHALKDGRTISESKVKLYEQHHHDLTQLKYFVKTYLAKEYDDIFRNVDSETTKNYVAYSYHVKEVKGTLPKNKATQEEFCKYVLGKVKNIECSEADKVDFDEMIQRLTDNSFMPKQVSGENRVIPYQLYYYELKTILNKAASYLPFLTQCGKDAISNQDKLLSIMTFRIPYFVGPLRKDNSEHAWLERKAGKIYPWNFNDKVDLDKSEEAFIRRMTNTCTYYPGEDVLPLDSLIYEKFMILNEINNIRIDGYPISVDVKQQVFGLFEKKRRVTVKDIQNLLLSLGALDKHGKLTGIDTTIHSNYNTYHHFKSLMERGVLTRDDVERIVERMTYSDDTKRVRLWLNNNYGTLTADDVKHISRLRKHDFGRLSKMFLTGLKGVHKETGERASILDFMWNTNDNLMQLLSECYTFSDEITKLQEAYYAKAQLSLNDFLDSMYISNAVKRPIYRTLAVVNDIRKACGTAPKRIFIEMARDGESKKKRSVTRREQIKNLYRSIRKDFQQEVDFLEKILENKSDGQLQSDALYLYFAQLGRDMYTGDPIKLEHIKDQSFYNIDHIYPQSMVKDDSLDNKVLVQSEINGEKSSRYPLDAAIRNKMKPLWDAYYNHGLISLKKYQRLTRSTPFTDDEKWDFINRQLVETRQSTKALAILLKRKFPDTEIVYSKAGLSSDFRHEFGLVKSRNINDLHHAKDAFLAIVTGNVYHERFNRRWFMVNQPYSVKTKTLFTHSIKNGNFVAWNGEEDLGRIVKMLKQNKNTIHFTRFSFDRKEGLFDIQPLKASTGLVPRKAGLDVVKYGGYDKSTAAYYLLVRFTLEDKKTQHKLMMIPVEGLYKARIDHDKEFLTDYAQTTISEILQKDKQKVINIMFPMGTRHIKLNSMISIDGFYLSIGGKSSKGKSVLCHAMVPLIVPHKIECYIKAMESFARKFKENNKLRIVEKFDKITVEDNLNLYELFLQKLQHNPYNKFFSTQFDVLTNGRSTFTKLSPEEQVQTLLNILSIFKTCRSSGCDLKSINGSAQAARIMISADLTGLSKKYSDIRLVEQSASGLFVSKSQNLLEYL

SEQ ID NO: 320 - protein, 1356 aa, Lactobacillus farciminis
MTKKEQPYNIGLDIGTSSVGWAVTNDNYDLLNIKKKNLWGVRLFEEAQTAKETRLNRSTRRRYRRRKNRINWLNEIFSEELAKTDPSFLIRLQNSWVSKKDPDRKRDKYNLFIDGPYTDKEYYREFPTIFHLRKELILNKDKADIRLIYLALHNILKYRGNFTYEHQKFNISNLNNNLSKELIELNQQLIKYDISFPDDCDWNHISDILIGRGNATQKSSNILKDFTLDKETKKLLKEVINLILGNVAHLNTIFKTSLTKDEEKLNFSGKDIESKLDDLDSILDDDQFTVLDAANRIYSTITLNEILNGESYFSMAKVNQYENHAIDLCKLRDMWHTTKNEEAVEQSRQAYDDYINKPKYGTKELYTSLKKFLKVALPTNLAKEAEEKISKGTYLVKPRNSENGVVPYQLNKIEMEKIIDNQSQYYPFLKENKEKLLSILSFRIPYYVGPLQSAEKNPFAWMERKSNGHARPWNFDEIVDREKSSNKFIRRMTVTDSYLVGEPVLPKNSLIYQRYEVLNELNNIRITENLKTNPIGSRLTVETKQRIYNELFKKYKKVTVKKLTKWLIAQGYYKNPILIGLSQKDEFNSTLTTYLDMKKIFGSSFMEDNKNYDQIEELIEWLTIFEDKQILNEKLHSSKYSYTPDQIKKISNMRYKGWGRLSKKILMDITTETNTPQLLQLSNYSILDLMWATNNNFISIMSNDKYDFKNYIENHNLNKNEDQNISDLVNDIHVSPALKRGITQSIKIVQEIVKFMGHAPKHIFIEVTRETKKSEITTSREKRIKRLQSKLLNKANDFKPQLREYLVPNKKIQEELKKHKNDLSSERIMLYFLQNGKSLYSEESLNINKLSDYQVDHILPRTYIPDDSLENKALVLAKENQRKADDLLLNSNVIDRNLERWTYMLNNNMIGLKKFKNLTRRVITDKDKLGFIHRQLVQTSQMVKGVANILDNMYKNQGTTCIQARANLSTAFRKALSGQDDTYHFKHPELVKNRNVNDFHHAQDAYLASFLGTYRLRRFPTNEMLLMNGEYNKFYGQVKELYSKKKKLPDSRKNGFIISPLVNGTTQYDRNTGEIIWNVGFRDKILKIFNYHQCNVTRKTEIKTGQFYDQTIYSPKNPKYKKLIAQKKDMDPNIYGGFSGDNKSSITIVKIDNNKIKPVAIPIRLINDLKDKKTLQNWLEENVKHKKSIQIIKNNVPIGQIIYSKKVGLLSLNSDREVANRQQLILPPEHSALLRLLQIPDEDLDQILAFYDKNILVEILQELITKMKKFYPFYKGEREFLIANIENFNQATTSEKVNSLEELITLLHANSTSAHLIFNNIEKKAFGRKTHGLTLNNTDFIYQSVTGLYETRIHIE

SEQ ID NO: 321 - protein, 1421 aa, Streptococcus sanguinis
MTKFNKNYSIGLDIGVSSVGYAVVTEDYRVPAFKFKVLGNTEKEKIKKNLIGSTTFVSAQPAKGTRVFRVNRRRIDRRNHRITYLRDIFQKEIEKVDKNFYRRLDESFRVLGDKSEDLQIKQPFFGDKELETAYHKKYPTIYHLRKHLADADKNSPVADIREVYMAISHILKYRGHFLTLDKINPNNINMQNSWIDFIESCQEVFDLEISDESKNIADIFKSSENRQEKVKKILPYFQQELLKKDKSIFKQLLQLLFGLKTKFKDCFELEEEPDLNFSKENYDENLENFLGSLEEDFSDVFAKLKVLRDTILLSGMLTYTGATHARFSATMVERYEEHRKDLQRFKFFIKQNLSEQDYLDIFGRKTQNGFDVDKETKGYVGYITNKMVLTNPQKQKTIQQNFYDYISGKITGIEGAEYFLNKISDGTFLRKLRTSDNGAIPNQIHAYELEKIIERQGKDYPFLLENKDKLLSILTFKIPYYVGPLAKGSNSRFAWIKRATSSDILDDNDEDTRNGKIRPWNYQKLINMDETRDAFITNLIGNDIILLNEKVLPKRSLIYEEVMLQNELTRVKYKDKYGKAHFFDSELRQNIINGLFKNNSKRVNAKSLIKYLSDNHKDLNAIEIVSGVEKGKSFNSTLKTYNDLKTIFSEELLDSEIYQKELEEIIKVITVFDDKKSIKNYLTKFFGHLEILDEEKINQLSKLRYSGWGRYSAKLLLDIRDEDTGFNLLQFLRNDEENRNLTKLISDNTLSFEPKIKDIQSKSTIEDDIFDEIKKLAGSPAIKRGILNSIKIVDELVQIIGYPPHNIVIEMARENMTTEEGQKKAKTRKTKLESALKNIENSLLENGKVPHSDEQLQSEKLYLYYLQNGKDMYTLDKTGSPAPLYLDQLDQYEVDHIIPYSFLPIDSIDNKVLTHRENNQQKLNNIPDKETVANMKPFWEKLYNAKLISQTKYQRLTTSERTPDGVLTESMKAGFIERQLVETRQIIKHVARILDNRFSDTKIITLKSQLITNFRNTFHIAKIRELNDYHHAHDAYLAVVVGQTLLKVYPKLAPELIYGHHAHFNRHEENKATLRKHLYSNIMRFFNNPDSKVSKDIWDCNRDLPIIKDVIYNSQINFVKRTMIKKGAFYNQNPVGKFNKQLAANNRYPLKTKALCLDTSIYGGYGPMNSALSIIIIAERFNEKKGKIETVKEFHDIFIIDYEKFNNNPFQFLNDTSENGFLKKNNINRVLGFYRIPKYSLMQKIDGTRMLFESKSNLHKATQFKLTKTQNELFFHMKRLLTKSNLMDLKSKSAIKESQNFILKHKEEFDNISNQLSAFSQKMLGNTTSLKNLIKGYNERKIKEIDIRDETIKYFYDNFIKMFSFVKSGAPKDINDFFDNKCTVARMRPKPDKKLLNATLIHQSITGLYETRIDLSKLGED

SEQ ID NO: 322 - protein, 1338 aa, Coprococcus catus
MKQEYFLGLDMGTGSLGWAVTDSTYQVMRKHGKALWGTRLFESASTAEERRMFRTARRRLDRRNWRIQVLQEIFSEEISKVDPGFFLRMKESKYYPEDKRDAEGNCPELPYALFVDDNYTDKNYHKDYPTIYHLRKMLMETTEIPDIRLVYLVLHHMMKHRGHFLLSGDISQIKEFKSTFEQLIQNIQDEELEWHISLDDAAIQFVEHVLKDRNLTRSTKKSRLIKQLNAKSACEKAILNLLSGGTVKLSDIFNNKELDESERPKVSFADSGYDDYIGIVEAELAEQYYIIASAKAVYDWSVLVEILGNSVSISEAKIKVYQKHQADLKTLKKIVRQYMTKEDYKRVFVDTEEKLNNYSAYIGMTKKNGKKVDLKSKQCTQADFYDFLKKNVIKVIDHKEITQEIESEIEKENFLPKQVTKDNGVIPYQVHDYELKKILDNLGTRMPFIKENAEKIQQLFEFRIPYYVGPLNRVDDGKDGKFTWSVRKSDARIYPWNFTEVIDVEASAEKFIRRMTNKCTYLVGEDVLPKDSLVYSKFMVLNELNNLRLNGEKISVELKQRIYEELFCKYRKVTRKKLERYLVIEGIAKKGVEITGIDGDFKASLTAYHDFKERLTDVQLSQRAKEAIVLNVVLFGDDKKLLKQRLSKMYPNLTTGQLKGICSLSYQGWGRLSKTFLEEITVPAPGTGEVWNIMTALWQTNDNLMQLLSRNYGFTNEVEEFNTLKKETDLSYKTVDELYVSPAVKRQIWQTLKVVKEIQKVMGNAPKRVFVEMAREKQEGKRSDSRKKQLVELYRACKNEERDWITELNAQSDQQLRSDKLFLYYIQKGRCMYSGETIQLDELWDNTKYDIDHIYPQSKTMDDSLNNRVLVKKNYNAIKSDTYPLSLDIQKKMMSFWKMLQQQGFITKEKYVRLVRSDELSADELAGFIERQIVETRQSTKAVATILKEALPDTEIVYVKAGNVSNFRQTYELLKVREMNDLHHAKDAYLNIVVGNAYFVKFTKNAAWFIRNNPGRSYNLKRMFEFDIERSGEIAWKAGNKGSIVTVKKVMQKNNILVTRKAYEVKGGLFDQQIMKKGKGQVPIKGNDERLADIEKYGGYNKAAGTYFMLVKSLDKKGKEIRTIEFVPLYLKNQIEINHESAIQYLAQERGLNSPEILLSKIKIDTLFKVDGFKMWLSGRTGNQLIFKGANQLILSHQEAAILKGVVKYVNRKNENKDAKLSERDGMTEEKLLQLYDTFLDKLSNTVYSIRLSAQIKTLTEKRAKFIGLSNEDQCIVLNEILHMFQCQSGSANLKLIGGPGSAGILVMNNNITACKQISVINQSPTGIYEKEIDLIKL

SEQ ID NO: 323 - protein, 1345 aa, Streptococcus mutans
MKKPYSIGLDIGTNSVGWAVVTDDYKVPAKKMKVLGNTDKSHIEKNLLGALLFDSGNTAEDRRLKRTARRRYTRRRNRILYLQEIFSEEMGKVDDSFFHRLEDSFLVTEDKRGERHPIFGNLEEEVKYHENFPTIYHLRQYLADNPEKVDLRLVYLALAHIIKFRGHFLIEGKFDTRNNDVQRLFQEFLAVYDNTFENSSLQEQNVQVEEILTDKISKSAKKDRVLKLFPNEKSNGRFAEFLKLIVGNQADFKKHFELEEKAPLQFSKDTYEEELEVLLAQIGDNYAELFLSAKKLYDSILLSGILTVTDVGTKAPLSASMIQRYNEHQMDLAQLKQFIRQKLSDKYNEVFSDVSKDGYAGYIDGKTNQEAFYKYLKGLLNKIEGSGYFLDKIEREDFLRKQRTFDNGSIPHQIHLQEMRAIIRRQAEFYPFLADNQDRIEKLLTFRIPYYVGPLARGKSDFAWLSRKSADKITPWNFDEIVDKESSAEAFINRMTNYDLYLPNQKVLPKHSLLYEKFTVYNELTKVKYKTEQGKTAFFDANMKQEIFDGVFKVYRKVTKDKLMDFLEKEFDEFRIVDLTGLDKENKVFNASYGTYHDLCKILDKDFLDNSKNEKILEDIVLTLTLFEDREMIRKRLENYSDLLTKEQVKKLERRHYTGWGRLSAELIHGIRNKESRKTILDYLIDDGNSNRNFMQLINDDALSFKEEIAKAQVIGETDNLNQVVSDIAGSPAIKKGILQSLKIVDELVKIMGHQPENIVVEMARENQFTNQGRRNSQQRLKGLTDSIKEFGSQILKEHPVENSQLQNDRLFLYYLQNGRDMYTGEELDIDYLSQYDIDHIIPQAFIKDNSIDNRVLTSSKENRGKSDDVPSKDVVRKMKSYWSKLLSAKLITQRKFDNLTKAERGGLTDDDKAGFIKRQLVETRQITKHVARILDERFNTETDENNKKIRQVKIVTLKSNLVSNFRKEFELYKVREINDYHHAHDAYLNAVIGKALLGVYPQLEPEFVYGDYPHFHGHKENKATAKKFFYSNIMNFFKKDDVRTDKNGEIIWKKDEHISNIKKVLSYPQVNIVKKVEEQTGGFSKESILPKGNSDKLIPRKTKKFYWDTKKYGGFDSPIVAYSILVIADIEKGKSKKLKTVKALVGVTIMEKMTFERDPVAFLERKGYRNVQEENIIKLPKYSLFKLENGRKRLLASARELQKGNEIVLPNHLGTLLYHAKNIHKVDEPKHLDYVDKHKDEFKELLDVVSNFSKKYTLAEGNLEKIKELYAQNNGEDLKELASSFINLLTFTAIGAPATFKFFDKNIDRKRYTSTTEILNATLIHQSITGLYETRIDLNKLGGD

SEQ ID NO: 324 - protein, 1368 aa, Streptococcus pyogenes [sequence omitted]

SEQ ID NO: 325 - protein, 1388 aa, Streptococcus thermophilus
MTKPYSIGLDIGTNSVGWAVTTDNYKVPSKKMKVLGNTSKKYIKKNLLGVLLFDSGITAEGRRLKRTARRRYTRRRNRILYLQEIFSTEMATLDDAFFQRLDDSFLVPDDKRDSKYPIFGNLVEEKAYHDEFPTIYHLRKYLADSTKKADLRLVYLALAHMIKYRGHFLIEGEFNSKNNDIQKNFQDFLDTYNAIFESDLSLENSKQLEEIVKDKISKLEKKDRILKLFPGEKNSGIFSEFLKLIVGNQADFRKCFNLDEKASLHFSKESYDEDLETLLGYIGDDYSDVFLKAKKLYDAILLSGFLTVTDNETEAPLSSAMIKRYNEHKEDLALLKEYIRNISLKTYNEVFKDDTKNGYAGYIDGKTNQEDFYVYLKKLLAEFEGADYFLEKIDREDFLRKQRTFDNGSIPYQIHLQEMRAILDKQAKFYPFLAKNKERIEKILTFRIPYYVGPLARGNSDFAWSIRKRNEKITPWNFEDVIDKESSAEAFINRMTSFDLYLPEEKVLPKHSLLYETFNVYNELTKVRFIAESMRDYQFLDSKQKKDIVRLYFKDKRKVTDKDIIEYLHAIYGYDGIELKGIEKQFNSSLSTYHDLLNIINDKEFLDDSSNEAIIEEIIHTLTIFEDREMIKQRLSKFENIFDKSVLKKLSRRHYTGWGKLSAKLINGIRDEKSGNTILDYLIDDGISNRNFMQLIHDDALSFKKKIQKAQIIGDEDKGNIKEVVKSLPGSPAIKKGILQSIKIVDELVKVMGGRKPESIVVEMARENQYTNQGKSNSQQRLKRLEKSLKELGSKILKENIPAKLSKIDNNALQNDRLYLYYLQNGKDMYTGDDLDIDRLSNYDIDHIIPQAFLKDNSIDNKVLVSSASNRGKSDDVPSLEVVKKRKTFWYQLLKSKLISQRKFDNLTKAERGGLSPEDKAGFIQRQLVETRQITKHVARLLDEKFNNKKDENNRAVRTVKIITLKSTLVSQFRKDFELYKVREINDFHHAHDAYLNAVVASALLKKYPKLEPEFVYGDYPKYNSFRERKSATEKVYFYSNIMNIFKKSISLADGRVIERPLIEVNEETGESVWNKESDLATVRRVLSYPQVNVVKKVEEQNHGLDRGKPKGLFNANLSSKPKPNSNENLVGAKEYLDPKKYGGYAGISNSFTVLVKGTIEKGAKKKITNVLEFQGISILDRINYRKDKLNFLLEKGYKDIELIIELPKYSLFELSDGSRRMLASILSTNNKRGEIHKGNQIFLSQKFVKLLYHAKRISNTINENHRKYVENHKKEFEELFYYILEFNENYVGAKKNGKLLNSAFQSWQNHSIDELCSSFIGPTGSERKGLFELTSRGSAADFEFLGVKIPRYRDYTPSSLLKDATLIHQSVTGLYETRIDLAKLGEG

SEQ ID NO: 326 - protein, 1374 aa, Fusobacterium nucleatum
MKKQKFSDYYLGFDIGTNSVGWCVTDLDYNVLRFNKKDMWGSRLFDEAKTAAERRVQRNSRRRLKRRKWRLNLLEEIFSDEIMKIDSNFFRRLKESSLWLEDKNSKEKFTLFNDDNYKDYDFYKQYPTIFHLRDELIKNPEKKDIRLIYLALHSIFKSRGHFLFEGQNLKEIKNFETLYNNLISFLEDNGINKSIDKDNIEKLEKIICDSGKGLKDKEKEFKGIFNSDKQLVAIFKLSVGSSVSLNDLFDTDEYKKEEVEKEKISFREQIYEDDKPIYYSILGEKIELLDIAKSFYDFMVLNNILSDSNYISEAKVKLYEEHKKDLKNLKYIIRKYNKENYDKLFKDKNENNYPAYIGLNKEKDKKEVVEKSRLKIDDLIKVIKGYLPKPERIEEKDKTIFNEILNKIELKTILPKQRISDNGTLPYQIHEVELEKILENQSKYYDFLNYEENGVSTKDKLLKTFKFRIPYYVGPLNSYHKDKGGNSWIVRKEEGKILPWNFEQKVDIEKSAEEFIKRMTNKCTYLNGEDVIPKDSFLYSEYIILNELNKVQVNDEFLNEENKRKIIDELFKENKKVSEKKFKEYLLVNQIANRTVELKGIKDSFNSNYVSYIKFKDIFGEKLNLDIYKEISEKSILWKCLYGDDKKIFEKKIKNEYGDILNKDEIKKINSFKFNTWGRLSEKLLTGIEFINLETGECYSSVMEALRRTNYNLMELLSSKFTLQESIDNENKEMNEVSYRDLIEESYVSPSLKRAILQTLKIYEEIKKITGRVPKKVFIEMARGGDESMKNKKIPARQEQLKKLYDSCGNDIANFSIDIKEMKNSLSSYDNNSLRQKKLYLYYLQFGKCMYTGREIDLDRLLQNNDTYDIDHIYPRSKVIKDDSFDNLVLVLKNENAEKSNEYPVKKEIQEKMKSFWRFLKEKNFISDEKYKRLTGKDDFELRGFMARQLVNVRQTTKEVGKILQQIEPEIKIVYSKAEIASSFREMFDFIKVRELNDTHHAKDAYLNIVAGNVYNTKFTEKPYRYLQEIKENYDVKKIYNYDIKNAWDKENSLEIVKKNMEKNTVNITRFIKEEKGELFNLNPIKKGETSNEIISIKPKLYDGKDNKLNEKYGYYTSLKAAYFIYVEHEKKNKKVKTFERITRIDSTLIKNEKNLIKYLVSQKKLLNPKIIKKIYKEQTLIIDSYPYTFTGVDSNKKVELKNKKQLYLEKKYEQILKNALKFVEDNQGETEENYKFIYLKKRNNNEKNETIDAVKERYNIEFNEMYDKFLEKLSSKDYKNYINNKLYTNFLNSKEKFKKLKLWEKSLILREFLKIFNKNTYGKYEIKDSQTKEKLFSFPEDTGRIRLGQSSLGNNKELLEESVTGLFVKKIKL

SEQ ID NO: 327 - protein, 1333 aa, Planococcus antarcticus
MKNYTIGLDIGVASVGWVCIDENYKILNYNNRHAFGVHEFESAESAAGRRLKRGMRRRYNRRKKRLQLLQSLFDSYITDSGFFSKTDSQHFWKNNNEFENRSLTEVLSSLRISSRKYPTIYHLRSDLIESNKKMDLRLVYLALHNLVKYRGHFLQEGNWSEAASAEGMDDQLLELVTRYAELENLSPLDLSESQWKAAETLLLNRNLTKTDQSKELTAMFGKEYEPFCKLVAGLGVSLHQLFPSSEQALAYKETKTKVQLSNENVEEVMELLLEEESALLEAVQPFYQQVVLYELLKGETYVAKAKVSAFKQYQKDMASLKNLLDKTFGEKVYRSYFISDKNSQREYQKSHKVEVLCKLDQFNKEAKFAETFYKDLKKLLEDKSKTSIGTTEKDEMLRIIKAIDSNQFLQKQKGIQNAAIPHQNSLYEAEKILRNQQAHYPFITTEWIEKVKQILAFRIPYYIGPLVKDTTQSPFSWVERKGDAPITPWNFDEQIDKAASAEAFISRMRKTCTYLKGQEVLPKSSLTYERFEVLNELNGIQLRTTGAESDFRHRLSYEMKCWIIDNVFKQYKTVSTKRLLQELKKSPYADELYDEHTGEIKEVFGTQKENAFATSLSGYISMKSILGAVVDDNPAMTEELIYWIAVFEDREILHLKIQEKYPSITDVQRQKLALVKLPGWGRFSRLLIDGLPLDEQGQSVLDHMEQYSSVFMEVLKNKGFGLEKKIQKMNQHQVDGTKKIRYEDIEELAGSPALKRGIWRSVKIVEELVSIFGEPANIVLEVAREDGEKKRTKSRKDQWEELTKTTLKNDPDLKSFIGEIKSQGDQRFNEQRFWLYVTQQGKCLYTGKALDIQNLSMYEVDHILPQNFVKDDSLDNLALVMPEANQRKNQVGQNKMPLEIIEANQQYAMRTLWERLHELKLISSGKLGRLKKPSFDEVDKDKFIARQLVETRQIIKHVRDLLDERFSKSDIHLVKAGIVSKFRRFSEIPKIRDYNNKHHAMDALFAAALIQSILGKYGKNFLAFDLSKKDRQKQWRSVKGSNKEFFLFKNFGNLRLQSPVTGEEVSGVEYMKHVYFELPWQTTKMTQTGDGMFYKESIFSPKVKQAKYVSPKTEKFVHDEVKNHSICLVEFTFMKKEKEVQETKFIDLKVIEHHQFLKEPESQLAKFLAEKETNSPIIHARIIRTIPKYQKIWIEHFPYYFISTRELHNARQFEISYELMEKVKQLSERSSVEELKIVFGLLIDQMNDNYPIYTKSSIQDRVQKFVDTQLYDFKSFEIGFEELKKAVAANAQRSDTFGSRISKKPKPEEVAIGYESITGLKYRKPRSVVGTKR

SEQ ID NO: 328 - protein, 1395 aa, Treponema denticola
MKKEIKDYFLGLDVGTGSVGWAVTDTDYKLLKANRKDLWGMRCFETAETAEVRRLHRGARRRIERRKKRIKLLQELFSQEIAKTDEGFFQRMKESPFYAEDKTILQENTLFNDKDFADKTYHKAYPTINHLIKAWIENKVKPDPRLLYLACHNIIKKRGHFLFEGDFDSENQFDTSIQALFEYLREDMEVDIDADSQKVKEILKDSSLKNSEKQSRLNKILGLKPSDKQKKAITNLISGNKINFADLYDNPDLKDAEKNSISFSKDDFDALSDDLASILGDSFELLLKAKAVYNCSVLSKVIGDEQYLSFAKVKIYEKHKTDLTKLKNVIKKHFPKDYKKVFGYNKNEKNNNNYSGYVGVCKTKSKKLIINNSVNQEDFYKFLKTILSAKSEIKEVNDILTEIETGTFLPKQISKSNAEIPYQLRKMELEKILSNAEKHFSFLKQKDEKGLSHSEKIIMLLTFKIPYYIGPINDNHKKFFPDRCWVVKKEKSPSGKTTPWNFFDHIDKEKTAEAFITSRTNFCTYLVGESVLPKSSLLYSEYTVLNEINNLQIIIDGKNICDIKLKQKIYEDLFKKYKKITQKQISTFIKHEGICNKTDEVIILGIDKECTSSLKSYIELKNIFGKQVDEISTKNMLEEIIRWATIYDEGEGKTILKTKIKAEYGKYCSDEQIKKILNLKFSGWGRLSRKFLETVTSEMPGFSEPVNIITAMRETQNNLMELLSSEFTFTENIKKINSGFEDAEKQFSYDGLVKPLFLSPSVKKMLWQTLKLVKEISHITQAPPKKIFIEMAKGAELEPARTKTRLKILQDLYNNCKNDADAFSSEIKDLSGKIENEDNLRLRSDKLYLYYTQLGKCMYCGKPIEIGHVFDTSNYDIDHIYPQSKIKDDSISNRVLVCSSCNKNKEDKYPLKSEIQSKQRGFWNFLQRNNFISLEKLNRLTRATPISDDETAKFIARQLVETRQATKVAAKVLEKMFPETKIVYSKAETVSMFRNKFDIVKCREINDFHHAHDAYLNIVVGNVYNTKFTNNPWNFIKEKRDNPKIADTYNYYKVFDYDVKRNNITAWEKGKTIITVKDMLKRNTPIYTRQAACKKGELFNQTIMKKGLGQHPLKKEGPFSNISKYGGYNKVSAAYYTLIEYEEKGNKIRSLETIPLYLVKDIQKDQDVLKSYLTDLLGKKEFKILVPKIKINSLLKINGFPCHITGKTNDSFLLRPAVQFCCSNNEVLYFKKIIRFSEIRSQREKIGKTISPYEDLSFRSYIKENLWKKTKNDEIGEKEFYDLLQKKNLEIYDMLLTKHKDTIYKKRPNSATIDILVKGKEKFKSLIIENQFEVILEILKLFSATRNVSDLQHIGGSKYSGVAKIGNKISSLDNCILIYQSITGIFEKRIDLLKV

SEQ ID NO: 329 - protein, 1327 aa, Solobacterium moorei
MEGQMKNNGNNLQQGNYYLGLDVGTSSVGWAVTDTDYNVLKFRGKSMWGARLFDEASTAEERRTHRGNRRRLARRKYRLLLLEQLFEKEIRKIDDNFFVRLHESNLWADDKSKPSKFLLFNDTNFTDKDYLKKYPTIYHLRSDLIHNSTEHDIRLVFLALHHLIKYRGHFIYDNSANGDVKTLDEAVSDFEEYLNENDIEFNIENKKEFINVLSDKHLTKKEKKISLKKLYGDITDSENINISVLIEMLSGSSISLSNLFKDIEFDGKQNLSLDSDIEETLNDVVDILGDNIDLLIHAKEVYDIAVLTSSLGKHKYLCDAKVELFEKNKKDLMILKKYIKKNHPEDYKKIFSSPTEKKNYAAYSQTNSKNVCSQEEFCLFIKPYIRDMVKSENEDEVRIAKEVEDKSFLTKLKGTNNSVVPYQIHERELNQILKNIVAYLPFMNDEQEDISVVDKIKLIFKFKIPYYVGPLNTKSTRSWVYRSDEKIYPWNFSNVIDLDKTAHEFMNRLIGRCTYTNDPVLPMDSLLYSKYNVLNEINPIKVNGKAIPVEVKQAIYTDLFENSKKKVTRKSIYIYLLKNGYIEKEDIVSGIDIEIKSKLKSHHDFTQIVQENKCTPEEIERIIKGILVYSDDKSMLRRWLKNNIKGLSENDVKYLAKLNYKEWGRLSKTLLTDIYTINPEDGEACSILDIMWNTNATLMEILSNEKYQFKQNIENYKAENYDEKQNLHEELDDMYISPAARRSIWQALRIVDEIVDIKKSAPKKIFIEMAREKKSAMKKKRTESRKDTLLELYKSCKSQADGFYDEELFEKLSNESNSRLRRDQLYLYYTQMGRSMYTGKRIDFDKLINDKNTYDIDHIYPRSKIKDDSITNRVLVEKDINGEKTDIYPISEDIRQKMQPFWKILKEKGLINEEKYKRLTRNYELTDEELSSFVARQLVETQQSTKALATLLKKEYPSAKIVYSKAGNVSEFRNRKDKELPKFREINDLHHAKDAYLNIVVGNVYDTKFTEKFFNNIRNENYSLKRVFDFSVPGAWDAKGSTFNTIKKYMAKNNPIIAFAPYEVKGELFDQQIVPKGKGQFPIKQGKDIEKYGGYNKLSSAFLFAVEYKGKKARERSLETVYIKDVELYLQDPIKYCESVLGLKEPQIIKPKILMGSLFSINNKKLVVTGRSGKQYVCHHIYQLSINDEDSQYLKNIAKYLQEEPDGNIERQNILNITSVNNIKLFDVLCTKFNSNTYEIILNSLKNDVNEGREKFSELDILEQCNILLQLLKAFKCNRESSNLEKLNNKKQAGVIVIPHLFTKCSVFKVIHQSITGLFEKEMDLLK

SEQ ID NO: 330 - protein, 1334 aa, Staphylococcus pseudintermedius
MGRKPYILSLDIGTGSVGYACMDKGFNVLKYHDKDALGVYLFDGALTAQERRQFRTSRRRKNRRIKRLGLLQELLAPLVQNPNFYQFQRQFAWKNDNMDFKNKSLSEVLSFLGYESKKYPTIYHLQEALLLKDEKFDPELIYMALYHLVKYRGHFLFDHLKIENLTNNDNMHDFVELIETYENLNNIKLNLDYEKTKVIYEILKDNEMTKNDRAKRVKNMEKKLEQFSIMLLGLKFNEGKLFNHADNAEELKGANQSHTFADNYEENLTPFLTVEQSEFIERANKIYLSLTLQDILKGKKSMAMSKVAAYDKFRNELKQVKDIVYKADSTRTQFKKIFVSSKKSLKQYDATPNDQTFSSLCLFDQYLIRPKKQYSLLIKELKKIIPQDSELYFEAENDTLLKVLNTTDNASIPMQINLYEAETILRNQQKYHAEITDEMIEKVLSLIQFRIPYYVGPLVNDHTASKFGWMERKSNESIKPWNFDEVVDRSKSATQFIRRMTNKCSYLINEDVLPKNSLLYQEMEVLNELNATQIRLQTDPKNRKYRMMPQIKLFAVEHIFKKYKTVSHSKFLEIMLNSNHRENFMNHGEKLSIFGTQDDKKFASKLSSYQDMTKIFGDIEGKRAQIEEIIQWITIFEDKKILVQKLKECYPELTSKQINQLKKLNYSGWGRLSEKLLTHAYQGHSIIELLRHSDENFMEILTNDVYGFQNFIKEENQVQSNKIQHQDIANLTTSPALKKGIWSTIKLVRELTSIFGEPEKIIMEFATEDQQKGKKQKSRKQLWDDNIKKNKLKSVDEYKYIIDVANKLNNEQLQQEKLWLYLSQNGKCMYSGQSIDLDALLSPNATKHYEVDHIFPRSFIKDDSIDNKVLVIKKMNQTKGDQVPLQFIQQPYERIAYWKSLNKAGLISDSKLHKLMKPEFTAMDKEGFIQRQLVETRQISVHVRDFLKEEYPNTKVIPMKAKMVSEFRKKFDIPKIRQMNDAHHAIDAYLNGVVYHGAQLAYPNVDLFDFNFKWEKVREKWKALGEFNTKQKSRELFFFKKLEKMEVSQGERLISKIKLDMNHFKINYSRKLANIPQQFYNQTAVSPKTAELKYESNKSNEVVYKGLTPYQTYVVAIKSVNKKGKEKMEYQMIDHYVFDFYKFQNGNEKELALYLAQRENKDEVLDAQIVYSLNKGDLLYINNHPCYFVSRKEVINAKQFELTVEQQLSLYNVMNNKETNVEKLLIEYDFIAEKVINEYHHYLNSKLKEKRVRTFFSESNQTHEDFIKALDELFKVVTASATRSDKIGSRKNSMTHRAFLGKGKDVKIAYTSISGLKTTKPKSLFKLAESRNEL

SEQ ID NO: 331 - protein, 1472 aa, Flavobacterium branchiophilum
MAKILGLDLGTNSIGWAVVERENIDFSLIDKGVRIFSEGVKSEKGIESSRAAERTGYRSARKIKYRRKLRKYETLKVLSLNRMCPLSIEEVEEWKKSGFKDYPLNPEFLKWLSTDEESNVNPYFFRDRASKHKVSLFELGRAFYHIAQRRGFLSNRLDQSAEGILEEHCPKIEAIVEDLISIDEISTNITDYFFETGILDSNEKNGYAKDLDEGDKKLVSLYKSLLAILKKNESDFENCKSEIIERLNKKDVLGKVKGKIKDISQAMLDGNYKTLGQYFYSLYSKEKIRNQYTSREEHYLSEFITICKVQGIDQINEEEKINEKKFDGLAKDLYKAIFFQRPLKSQKGLIGKCSFEKSKSRCAISHPDFEEYRMWTYLNTIKIGTQSDKKLRFLTQDEKLKLVPKFYRKNDFNFDVLAKELIEKGSSFGFYKSSKKNDFFYWFNYKPTDTVAACQVAASLKNAIGEDWKTKSFKYQTINSNKEQVSRTVDYKDLWHLLTVATSDVYLYEFAIDKLGLDEKNAKAFSKTKLKKDFASLSLSAINKILPYLKEGLLYSHAVFVANIENIVDENIWKDEKQRDYIKTQISEIIENYTLEKSRFEIINGLLKEYKSENEDGKRVYYSKEAEQSFENDLKKKLVLFYKSNEIENKEQQETIFNELLPIFIQQLKDYEFIKIQRLDQKVLIFLKGKNETGQIFCTEEKGTAEEKEKKIKNRLKKLYHPSDIEKFKKKIIKDEFGNEKIVLGSPLTPSIKNPMAMRALHQLRKVLNALILEGQIDEKTIIHIEMARELNDANKRKGIQDYQNDNKKFREDAIKEIKKLYFEDCKKEVEPTEDDILRYQLWMEQNRSEIYEEGKNISICDIIGSNPAYDIEHTIPRSRSQDNSQMNKTLCSQRFNREVKKQSMPIELNNHLEILPRIAHWKEEADNLTREIEIISRSIKAAATKEIKDKKIRRRHYLTLKRDYLQGKYDRFIWEEPKVGFKNSQIPDTGIITKYAQAYLKSYFKKVESVKGGMVAEFRKIWGIQESFIDENGMKHYKVKDRSKHTHHTIDAITIACMTKEKYDVLAHAWTLEDQQNKKEARSIIEASKPWKTFKEDLLKIEEEILVSHYTPDNVKKQAKKIVRVRGKKQFVAEVERDVNGKAVPKKAASGKTIYKLDGEGKKLPRLQQGDTIRGSLHQDSIYGAIKNPLNTDEIKYVIRKDLESIKGSDVESIVDEVVKEKIKEAIANKVLLLSSNAQQKNKLVGTVWMNEEKRIAINKVRIYANSVKNPLHIKEHSLLSKSKHVHKQKVYGQNDENYAMAIYELDGKRDFELINIFNLAKLIKQGQGFYPLHKKKEIKGKIVFVPIEKRNKRDVVLKRGQQVVFYDKEVENPKDISEIVDFKGRIYIIEGLSIQRIVRPSGKVDEYGVIMLRYFKEARKADDIKQDNFKPDGVFKLGENKPTRKMNHQFTAFVEGIDFKVLPSGKFEKI

SEQ ID NO: 332 - protein, 1688 aa, Ignavibacterium album
MEFKKVLGLDIGTNSIGCALLSLPKSIQDYGKGGRLEWLTSRVIPLDADYMKAFIDGKNGLPQVITPAGKRRQKRGSRRLKHRYKLRRSRLIRVFKTLNWLPEDFPLDNPKRIKETISTEGKFSFRISDYVPISDESYREFYREFGYPENEIEQVIEEINFRRKTKGKNKNPMIKLLPEDWVVYYLRKKALIKPTTKEELIRIIYLFNQRRGFKSSRKDLTETAILDYDEFAKRLAEKEKYSAENYETKFVSITKVKEVVELKTDGRKGKKRFKVILEDSRIEPYEIERKEKPDWEGKEYTFLVTQKLEKGKFKQNKPDLPKEEDWALCTTALDNRMGSKHPGEFFFDELLKAFKEKRGYKIRQYPVNRWRYKKELEFIWTKQCQLNPELNNLNINKEILRKLATVLYPSQSKFFGPKIKEFENSDVLHIISEDIIYYQRDLKSQKSLISECRYEKRKGIDGEIYGLKCIPKSSPLYQEFRIWQDIHNIKVIRKESEVNGKKKINIDETQLYINENIKEKLFELFNSKDSLSEKDILELISLNIINSGIKISKKEEETTHRINLFANRKELKGNETKSRYRKVFKKLGFDGEYILNHPSKLNRLWHSDYSNDYADKEKTEKSILSSLGWKNRNGKWEKSKNYDVFNLPLEVAKAIANLPPLKKEYGSYSALAIRKMLVVMRDGKYWQHPDQIAKDQENTSLMLFDKNLIQLTNNQRKVLNKYLLTLAEVQKRSTLIKQKLNEIEHNPYKLELVSDQDLEKQVLKSFLEKKNESDYLKGLKTYQAGYLIYGKHSEKDVPIVNSPDELGEYIRKKLPNNSLRNPIVEQVIRETIFIVRDVWKSFGIIDEIHIELGRELKNNSEERKKTSESQEKNFQEKERARKLLKELLNSSNFEHYDENGNKIFSSFTVNPNPDSPLDIEKFRIWKNQSGLTDEELNKKLKDEKIPTEIEVKKYILWLTQKCRSPYTGKIIPLSKLFDSNVYEIEHIIPRSKMKNDSTNNLVICELGVNKAKGDRLAANFISESNGKCKFGEVEYTLLKYGDYLQYCKDTFKYQKAKYKNLLATEPPEDFIERQINDTRYIGRKLAELLTPVVKDSKNIIFTIGSITSELKITWGLNGVWKDILRPRFKRLESIINKKLIFQDEDDPNKYHFDLSINPQLDKEGLKRLDHRHHALDATIIAATTREHVRYLNSLNAADNDEEKREYFLSLCNHKIRDFKLPWENFTSEVKSKLLSCVVSYKESKPILSDPFNKYLKWEYKNGKWQKVFAIQIKNDRWKAVRRSMFKEPIGTVWIKKIKEVSLKEAIKIQAIWEEVKNDPVRKKKEKYIYDDYAQKVIAKIVQELGLSSSMRKQDDEKLNKFINEAKVSAGVNKNLNTTNKTIYNLEGRFYEKIKVAEYVLYKAKRMPLNKKEYIEKLSLQKMFNDLPNFILEKSILDNYPEILKELESDNKYIIEPHKKNNPVNRLLLEHILEYHNNPKEAFSTEGLEKLNKKAINKIGKPIKYITRLDGDINEEEIFRGAVFETDKGSNVYFVMYENNQTKDREFLKPNPSISVLKAIEHKNKIDFFAPNRLGFSRIILSPGDLVYVPTNDQYVLIKDNSSNETIINWDDNEFISNRIYQVKKFTGNSCYFLKNDIASLILSYSASNGVGEFGSQNISEYSVDDPPIRIKDVCIKIRVDRLGNVRPL

SEQ ID NO: 333 - protein, 1415 aa, Bergeyella zoohelcum
MKHILGLDLGTNSIGWALIERNIEEKYGKIIGMGSRIVPMGAELSKFEQGQAQTKNADRRTNRGARRLNKRYKQRRNKLIYILQKLDMLPSQIKLKEDFSDPNKIDKITILPISKKQEQLTAFDLVSLRVKALTEKVGLEDLGKIIYKYNQLRGYAGGSLEPEKEDIFDEEQSKDKKNKSFIAFSKIVFLGEPQEEIFKNKKLNRRAIIVETEEGNFEGSTFLENIKVGDSLELLINISASKSGDTITIKLPNKTNWRKKMENIENQLKEKSKEMGREFYISEFLLELLKENRWAKIRNNTILRARYESEFEAIWNEQVKHYPFLENLDKKTLIEIVSFIFPGEKESQKKYRELGLEKGLKYIIKNQVVFYQRELKDQSHLISDCRYEPNEKAIAKSHPVFQEYKVWEQINKLIVNTKIEAGTNRKGEKKYKYIDRPIPTALKEWIFEELQNKKEITFSAIFKKLKAEFDLREGIDFLNGMSPKDKLKGNETKLQLQKSLGELWDVLGLDSINRQIELWNILYNEKGNEYDLTSDRTSKVLEFINKYGNNIVDDNAEETAIRISKIKFARAYSSLSLKAVERILPLVRAGKYFNNDFSQQLQSKILKLLNENVEDPFAKAAQTYLDNNQSVLSEGGVGNSIATILVYDKHTAKEYSHDELYKSYKEINLLKQGDLRNPLVEQIINEALVLIRDIWKNYGIKPNEIRVELARDLKNSAKERATIHKRNKDNQTINNKIKETLVKNKKELSLANIEKVKLWEAQRHLSPYTGQPIPLSDLFDKEKYDVDHIIPISRYFDDSFTNKVISEKSVNQEKANRTAMEYFEVGSLKYSIFTKEQFIAHVNEYFSGVKRKNLLATSIPEDPVQRQIKDTQYIAIRVKEELNKIVGNENVKTTTGSITDYLRNHWGLTDKFKLLLKERYEALLESEKFLEAEYDNYKKDFDSRKKEYEEKEVLFEEQELTREEFIKEYKENYIRYKKNKLIIKGWSKRIDHRHHAIDALIVACTEPAHIKRLNDLNKVLQDWLVEHKSEFMPNFEGSNSELLEEILSLPENERTEIFTQIEKFRAIEMPWKGFPEQVEQKLKEIIISHKPKDKLLLQYNKAGDRQIKLRGQLHEGTLYGISQGKEAYRIPLTKFGGSKFATEKNIQKIVSPFLSGFIANHLKEYNNKKEEAFSAEGIMDLNNKLAQYRNEKGELKPHTPISTVKIYYKDPSKNKKKKDEEDLSLQKLDREKAFNEKLYVKTGDNYLFAVLEGEIKTKKTSQIKRLYDIISFFDATNFLKEEFRNAPDKKTFDKDLLFRQYFEERNKAKLLFTLKQGDFVYLPNENEEVILDKESPLYNQYWGDLKERGKNIYVVQKFSKKQIYFIKHTIADIIKKDVEFGSQNCYETVEGRSIKENCFKLEIDRLGNIVKVIKR

SEQ ID NO: 334 - protein, 1166 aa, Nitrobacter hamburgensis
MHVEIDFPHFSRGDSHLAMNKNEILRGSSVLYRLGLDLGSNSLGWFVTHLEKRGDRHEPVALGPGGVRIFPDGRDPQSGTSNAVDRRMARGARKRRDRFVERRKELIAALIKYNLLPDDARERRALEVLDPYALRKTALTDTLPAHHVGRALFHLNQRRGFQSNRKTDSKQSEDGAIKQAASRLATDKGNETLGVFFADMHLRKSYEDRQTAIRAELVRLGKDHLTGNARKKIWAKVRKRLFGDEVLPRADAPHGVRARATITGTKASYDYYPTRDMLRDEFNAIWAGQSAHHATITDEARTEIEHIIFYQRPLKPAIVGKCTLDPATRPFKEDPEGYRAPWSHPLAQRFRILSEARNLEIRDTGKGSRRLTKEQSDLVVAALLANREVKFDKLRTLLKLPAEARFNLESDRRAALDGDQTAARLSDKKGFNKAWRGFPPERQIAIVARLEETEDENELIAWLEKECALDGAAAARVANTTLPDGHCRLGLRAIKKIVPIMQDGLDEDGVAGAGYHIAAKRAGYDHAKLPTGEQLGRLPYYGQWLQDAVVGSGDARDQKEKQYGQFPNPTVHIGLGQLRRVVNDLIDKYGPPTEISIEFTRALKLSEQQKAERQREQRRNQDKNKARAEELAKFGRPANPRNLLKMRLWEELAHDPLDRKCVYTGEQISIERLLSDEVDIDHILPVAMTLDDSPANKIICMRYANRHKRKQTPSEAFGSSPTLQGHRYNWDDIAARATGLPRNKRWRFDANAREEFDKRGGFLARQLNETGWLARLAKQYLGAVTDPNQIWVVPGRLTSMLRGKWGLNGLLPSDNYAGVQDKAEEFLASTDDMEFSGVKNRADHRHHAIDGLVTALTDRSLLWKMANAYDEEHEKFVIEPPWPTMRDDLKAALEKMVVSHKPDHGIEGKLHEDSAYGFVKPLDATGLKEEEAGNLVYRKAIESLNENEVDRIRDIQLRTIVRDHVNVEKTKGVALADALRQLQAPSDDYPQFKHGLRHVRILKKEKGDYLVPIANRASGVAYKAYSAGENFCVEVFETAGGKWDGEAVRRFDANKKNAGPKIAHAPQWRDANEGAKLVMRIHKGDLIRLDHEGRARIMVVHRLDAAAGRFKLADHNETGNLDKRHATNNDIDPFRWLMASYNTLKKLAAVPVRVDELGRVWRVMPN

SEQ ID NO: 335 - protein, 1498 aa, Odoribacter laneus
METTLGIDLGTNSIGLALVDQEEHQILYSGVRIFPEGINKDTIGLGEKEESRNATRRAKRQMRRQYFRKKLRKAKLLELLIAYDMCPLKPEDVRRWKNWDKQQKSTVRQFPDTPAFREWLKQNPYELRKQAVTEDVTRPELGRILYQMIQRRGFLSSRKGKEEGKIFTGKDRMVGIDETRKNLQKQTLGAYLYDIAPKNGEKYRFRTERVRARYTLRDMYIREFEIIWQRQAGHLGLAHEQATRKKNIFLEGSATNVRNSKLITHLQAKYGRGHVLIEDTRITVTFQLPLKEVLGGKIEIEEEQLKFKSNESVLFWQRPLRSQKSLLSKCVFEGRNFYDPVHQKWIIAGPTPAPLSHPEFEEFRAYQFINNIIYGKNEHLTAIQREAVFELMCTESKDFNFEKIPKHLKLFEKFNFDDTTKVPACTTISQLRKLFPHPVWEEKREEIWHCFYFYDDNTLLFEKLQKDYALQTNDLEKIKKIRLSESYGNVSLKAIRRINPYLKKGYAYSTAVLLGGIRNSFGKRFEYFKEYEPEIEKAVCRILKEKNAEGEVIRKIKDYLVHNRFGFAKNDRAFQKLYHHSQAITTQAQKERLPETGNLRNPIVQQGLNELRRTVNKLLATCREKYGPSFKFDHIHVEMGRELRSSKTEREKQSRQIRENEKKNEAAKVKLAEYGLKAYRDNIQKYLLYKEIEEKGGTVCCPYTGKTLNISHTLGSDNSVQIEHIIPYSISLDDSLANKTLCDATFNREKGELTPYDFYQKDPSPEKWGASSWEEIEDRAFRLLPYAKAQRFIRRKPQESNEFISRQLNDTRYISKKAVEYLSAICSDVKAFPGQLTAELRHLWGLNNILQSAPDITFPLPVSATENHREYYVITNEQNEVIRLFPKQGETPRTEKGELLLTGEVERKVFRCKGMQEFQTDVSDGKYWRRIKLSSSVTWSPLFAPKPISADGQIVLKGRIEKGVFVCNQLKQKLKTGLPDGSYWISLPVISQTFKEGESVNNSKLTSQQVQLFGRVREGIFRCHNYQCPASGADGNFWCTLDTDTAQPAFTPIKNAPPGVGGGQIILTGDVDDKGIFHADDDLHYELPASLPKGKYYGIFTVESCDPTLIPIELSAPKTSKGENLIEGNIWVDEHTGEVRFDPKKNREDQRHHAIDAIVIALSSQSLFQRLSTYNARRENKKRGLDSTEHFPSPWPGFAQDVRQSVVPLLVSYKQNPKTLCKISKTLYKDGKKIHSCGNAVRGQLHKETVYGQRTAPGATEKSYHIRKDIRELKTSKHIGKVVDITIRQMLLKHLQENYHIDITQEFNIPSNAFFKEGVYRIFLPNKHGEPVPIKKIRMKEELGNAERLKDNINQYVNPRNNHHVMIYQDADGNLKEEIVSFWSVIERQNQGQPIYQLPREGRNIVSILQINDTFLIGLKEEEPEVYRNDLSTLSKHLYRVQKLSGMYYTFRHHLASTLNNEREEFRIQSLEAWKRANPVKVQIDEIGRITFLNGPLC

SEQ ID NO: 336 - protein, 1372 aa, Legionella pneumophila
MESSQILSPIGIDLGGKFTGVCLSHLEAFAELPNHANTKYSVILIDHNNFQLSQAQRRATRHRVRNKKRNQFVKRVALQLFQHILSRDLNAKEETALCHYLNNRGYTYVDTDLDEYIKDETTINLLKELLPSESEHNFIDWFLQKMQSSEFRKILVSKVEEKKDDKELKNAVKNIKNFITGFEKNSVEGHRHRKVYFENIKSDITKDNQLDSIKKKIPSVCLSNLLGHLSNLQWKNLHRYLAKNPKQFDEQTFGNEFLRMLKNFRHLKGSQESLAVRNLIQQLEQSQDYISILEKTPPEITIPPYEARTNTGMEKDQSLLLNPEKLNNLYPNWRNLIPGIIDAHPFLEKDLEHTKLRDRKRIISPSKQDEKRDSYILQRYLDLNKKIDKFKIKKQLSFLGQGKQLPANLIETQKEMETHFNSSLVSVLIQIASAYNKEREDAAQGIWFDNAFSLCELSNINPPRKQKILPLLVGAILSEDFINNKDKWAKFKIFWNTHKIGRTSLKSKCKEIEEARKNSGNAFKIDYEEALNHPEHSNNKALIKIIQTIPDIIQAIQSHLGHNDSQALIYHNPFSLSQLYTILETKRDGFHKNCVAVTCENYWRSQKTEIDPEISYASRLPADSVRPFDGVLARMMQRLAYEIAMAKWEQIKHIPDNSSLLIPIYLEQNRFEFEESFKKIKGSSSDKTLEQAIEKQNIQWEEKFQRIINASMNICPYKGASIGGQGEIDHIYPRSLSKKHFGVIFNSEVNLIYCSSQGNREKKEEHYLLEHLSPLYLKHQFGTDNVSDIKNFISQNVANIKKYISFHLLTPEQQKAARHALFLDYDDEAFKTITKFLMSQQKARVNGTQKFLGKQIMEFLSTLADSKQLQLEFSIKQITAEEVHDHRELLSKQEPKLVKSRQQSFPSHAIDATLTMSIGLKEFPQFSQELDNSWFINHLMPDEVHLNPVRSKEKYNKPNISSTPLFKDSLYAERFIPVWVKGETFAIGFSEKDLFEIKPSNKEKLFTLLKTYSTKNPGESLQELQAKSKAKWLYFPINKTLALEFLHHYFHKEIVTPDDTTVCHFINSLRYYTKKESITVKILKEPMPVLSVKFESSKKNVLGSFKHTIALPATKDWERLFNHPNFLALKANPAPNPKEFNEFIRKYFLSDNNPNSDIPNNGHNIKPQKHKAVRKVFSLPVIPGNAGTMMRIRRKDNKGQPLYQLQTIDDTPSMGIQINEDRLVKQEVLMDAYKTRNLSTIDGINNSEGQAYATFDNWLTLPVSTFKPEIIKLEMKPHSKTRRYIRITQSLADFIKTIDEALMIKPSDSIDDPLNMPNEIVCKNKLFGNELKPRDGKMKIVSTGKIVTYEFESDSTPQWIQTLYVTQLKKQP

SEQ ID NO: 337 - protein, 1517 aa, Bacteroides sp.
MKKIVGLDLGTNSIGWALINAYINKEHLYGIEACGSRIIPMDAAILGNFDKGNSISQTADRTSYRGIRRLRERHLLRRERLHRILDLLGFLPKHYSDSLNRYGKFLNDIECKLPWVKDETGSYKFIFQESFKEMLANFTEHHPILIANNKKVPYDWTIYYLRKKALTQKISKEELAWILLNFNQKRGYYQLRGEEEETPNKLVEYYSLKVEKVEDSGERKGKDTWYNVHLENGMIYRRTSNIPLDWEGKTKEFIVTTDLEADGSPKKDKEGNIKRSFRAPKDDDWTLIKKKTEADIDKIKMTVGAYIYDTLLQKPDQKIRGKLVRTIERKYYKNELYQILKTQSEFHEELRDKQLYIACLNELYPNNEPRRNSISTRDFCHLFIEDIIFYQRPLKSKKSLIDNCPYEENRYIDKESGEIKHASIKCIAKSHPLYQEFRLWQFIVNLRIYRKETDVDVTQELLPTEADYVTLFEWLNEKKEIDQKAFFKYPPFGFKKTTSNYRWNYVEDKPYPCNETHAQIIARLGKAHIPKAFLSKEKEETLWHILYSIEDKQEIEKALHSFANKNNLSEEFIEQFKNFPPFKKEYGSYSAKAIKKLLPLMRMGKYWSIENIDNGTRIRINKIIDGEYDENIRERVRQKAINLTDITHFRALPLWLACYLVYDRHSEVKDIVKWKTPKDIDLYLKSFKQHSLRNPIVEQVITETLRTVRDIWQQVGHIDEIHIELGREMKNPADKRARMSQQMIKNENTNLRIKALLTEFLNPEFGIENVRPYSPSQQDLLRIYEEGVLNSILELPEDIGIILGKFNQTDTLKRPTRSEILRYKLWLEQKYRSPYTGEMIPLSKLFTPAYEIEHIIPQSRYFDDSLSNKVICESEINKLKDRSLGYEFIKNHHGEKVELAFDKPVEVLSVEAYEKLVHESYSHNRSKMKKLLMEDIPDQFIERQLNDSRYISKVVKSLLSNIVREENEQEAISKNVIPCTGGITDRLKKDWGINDVWNKIVLPRFIRLNELTESTRFTSINTNNTMIPSMPLELQKGFNKKRIDHRHHAMDAIIIACANRNIVNYLNNVSASKNTKITRRDLQTLLCHKDKTDNNGNYKWVIDKPWETFTQDTLTALQKITVSFKQNLRVINKTTNHYQHYENGKKIVSNQSKGDSWAIRKSMHKETVHGEVNLRMIKTVSFNEALKKPQAIVEMDLKKKILAMLELGYDTKRIKNYFEENKDTWQDINPSKIKVYYFTKETKDRYFAVRKPIDTSFDKKKIKESITDTGIQQIMLRHLETKDNDPTLAFSPDGIDEMNRNILILNKGKKHQPIYKVRVYEKAEKFTVGQKGNKRTKFVEAAKGTNLFFAIYETEEIDKDTKKVIRKRSYSTIPLNVVIERQKQGLSSAPEDENGNLPKYILSPNDLVYVPTQEEINKGEVVMPIDRDRIYKMVDSSGITANFIPASTANLIFALPKATAEIYCNGENCIQNEYGIGSPQSKNQKAITGEMVKEICFPIKVDRLGNIIQVGSCILTN

SEQ ID NO: 338 - protein, 1101 aa, Akkermansia muciniphila
MSRSLTFSFDIGYASIGWAVIASASHDDADPSVCGCGTVLFPKDDCQAFKRREYRRLRRNIRSRRVRIERIGRLLVQAQIITPEMKETSGHPAPFYLASEALKGHRTLAPIELWHVLRWYAHNRGYDNNASWSNSLSEDGGNGEDTERVKHAQDLMDKHGTATMAETICRELKLEEGKADAPMEVSTPAYKNLNTAFPRLIVEKEVRRILELSAPLIPGLTAEIIELIAQHHPLTTEQRGVLLQHGIKLARRYRGSLLFGQLIPRFDNRIISRCPVTWAQVYEAELKKGNSEQSARERAEKLSKVPTANCPEFYEYRMARILCNIRADGEPLSAEIRRELMNQARQEGKLTKASLEKAISSRLGKETETNVSNYFTLHPDSEEALYLNPAVEVLQRSGIGQILSPSVYRIAANRLRRGKSVTPNYLLNLLKSRGESGEALEKKIEKESKKKEADYADTPLKPKYATGRAPYARTVLKKVVEEILDGEDPTRPARGEAHPDGELKAHDGCLYCLLDTDSSVNQHQKERRLDTMTNNHLVRHRMLILDRLLKDLIQDFADGQKDRISRVCVEVGKELTTFSAMDSKKIQRELTLRQKSHTDAVNRLKRKLPGKALSANLIRKCRIAMDMNWTCPFTGATYGDHELENLELEHIVPHSFRQSNALSSLVLTWPGVNRMKGQRTGYDFVEQEQENPVPDKPNLHICSLNNYRELVEKLDDKKGHEDDRRRKKKRKALLMVRGLSHKHQSQNHEAMKEIGMTEGMMTQSSHLMKLACKSIKTSLPDAHIDMIPGAVTAEVRKAWDVFGVFKELCPEAADPDSGKILKENLRSLTHLHHALDACVLGLIPYIIPAHHNGLLRRVLAMRRIPEKLIPQVRPVANQRHYVLNDDGRMMLRDLSASLKENIREQLMEQRVIQHVPADMGGALLKETMQRVLSVDGSGEDAMVSLSKKKDGKKEKNQVKASKLVGVFPEGPSKLKALKAAIEIDGNYGVALDPKPVVIRHIKVFKRIMALKEQNGGKPVRILKKGMLIHLTSSKDPKHAGVWRIESIQDSKGGVKLDLQRAHCAVPKNKTHECNWREVDLISLLKKYQMKRYPTSYTGTPR

SEQ ID NO: 339 - protein, 1424 aa, Prevotella sp.
MTQKVLGLDLGTNSIGSAVRNLDLSDDLQWQLEFFSSDIFRSSVNKESNGREYSLAAQRSAHRRSRGLNEVRRRRLWATLNLLIKHGFCPMSSESLMRWCTYDKRKGLFREYPIDDKDFNAWILLDFNGDGRPDYSSPYQLRRELVTRQFDFEQPIERYKLGRALYHIAQHRGFKSSKGETLSQQETNSKPSSTDEIPDVAGAMKASEEKLSKGLSTYMKEHNLLTVGAAFAQLEDEGVRVRNNNDYRAIRSQFQHEIETIFKFQQGLSVESELYERLISEKKNVGTIFYKRPLRSQRGNVGKCTLERSKPRCAIGHPLFEKFRAWTLINNIKVRMSVDTLDEQLPMKLRLDLYNECFLAFVRTEFKFEDIRKYLEKRLGIHFSYNDKTINYKDSTSVAGCPITARFRKMLGEEWESFRVEGQKERQAHSKNNISFHRVSYSIEDIWHFCYDAEEPEAVLAFAQETLRLERKKAEELVRIWSAMPQGYAMLSQKAIRNINKILMLGLKYSDAVILAKVPELVDVSDEELLSIAKDYYLVEAQVNYDKRINSIVNGLIAKYKSVSEEYRFADHNYEYLLDESDEKDIIRQIENSLGARRWSLMDANEQTDILQKVRDRYQDFFRSHERKFVESPKLGESFENYLTKKFPMVEREQWKKLYHPSQITIYRPVSVGKDRSVLRLGNPDIGAIKNPTVLRVLNTLRRRVNQLLDDGVISPDETRVVVETARELNDANRKWALDTYNRIRHDENEKIKKILEEFYPKRDGISTDDIDKARYVIDQREVDYFTGSKTYNKDIKKYKFWLEQGGQCMYTGRTINLSNLFDPNAFDIEHTIPESLSFDSSDMNLTLCDAHYNRFIKKNHIPTDMPNYDKAITIDGKEYPAITSQLQRWVERVERLNRNVEYWKGQARRAQNKDRKDQCMREMHLWKMELEYWKKKLERFTVTEVTDGFKNSQLVDTRVITRHAVLYLKSIFPHVDVQRGDVTAKFRKILGIQSVDEKKDRSLHSHHAIDATTLTIIPVSAKRDRMLELFAKIEEINKMLSFSGSEDRTGLIQELEGLKNKLQMEVKVCRIGHNVSEIGTFINDNIIVNHHIKNQALTPVRRRLRKKGYIVGGVDNPRWQTGDALRGEIHKASYYGAITQFAKDDEGKVLMKEGRPQVNPTIKFVIRRELKYKKSAADSGFASWDDLGKAIVDKELFALMKGQFPAETSFKDACEQGIYMIKKGKNGMPDIKLHHIRHVRCEAPQSGLKIKEQTYKSEKEYKRYFYAAVGDLYAMCCYTNGKIREFRIYSLYDVSCHRKSDIEDIPEFITDKKGNRLMLDYKLRTGDMILLYKDNPAELYDLDNVNLSRRLYKINRFESQSNLVLMTHHLSTSKERGRSLGKTVDYQNLPESIRSSVKSLNFLIMGENRDFVIKNGKIIFNHR

SEQ ID NO: 340 - protein, 1409 aa, Wolinella succinogenes
MLVSPISVDLGGKNTGFFSFTDSLDNSQSGTVIYDESFVLSQVGRRSKRHSKRNNLRNKLVKRLFLLILQEHHGLSIDVLPDEIRGLFNKRGYTYAGFELDEKKKDALESDTLKEFLSEKLQSIDRDSDVEDFLNQIASNAESFKDYKKGFEAVFASATHSPNKKLELKDELKSEYGENAKELLAGLRVTKEILDEFDKQENQGNLPRAKYFEELGEYIATNEKVKSFFDSNSLKLTDMTKLIGNISNYQLKELRRYFNDKEMEKGDIWIPNKLHKITERFVRSWHPKNDADRQRRAELMKDLKSKEIMELLTTTEPVMTIPPYDDMNNRGAVKCQTLRLNEEYLDKHLPNWRDIAKRLNHGKFNDDLADSTVKGYSEDSTLLHRLLDTSKEIDIYELRGKKPNELLVKTLGQSDANRLYGFAQNYYELIRQKVRAGIWVPVKNKDDSLNLEDNSNMLKRCNHNPPHKKNQIHNLVAGILGVKLDEAKFAEFEKELWSAKVGNKKLSAYCKNIEELRKTHGNTFKIDIEELRKKDPAELSKEEKAKLRLTDDVILNEWSQKIANFFDIDDKHRQRFNNLFSMAQLHTVIDTPRSGFSSTCKRCTAENRFRSETAFYNDETGEFHKKATATCQRLPADTQRPFSGKIERYIDKLGYELAKIKAKELEGMEAKEIKVPIILEQNAFEYEESLRKSKTGSNDRVINSKKDRDGKKLAKAKENAEDRLKDKDKRIKAFSSGICPYCGDTIGDDGEIDHILPRSHTLKIYGTVFNPEGNLIYVHQKCNQAKADSIYKLSDIKAGVSAQWIEEQVANIKGYKTFSVLSAEQQKAFRYALFLQNDNEAYKKVVDWLRTDQSARVNGTQKYLAKKIQEKLTKMLPNKHLSFEFILADATEVSELRRQYARQNPLLAKAEKQAPSSHAIDAVMAFVARYQKVFKDGTPPNADEVAKLAMLDSWNPASNEPLTKGLSTNQKIEKMIKSGDYGQKNMREVFGKSIFGENAIGERYKPIVVQEGGYYIGYPATVKKGYELKNCKVVTSKNDIAKLEKIIKNQDLISLKENQYIKIFSINKQTISELSNRYFNMNYKNLVERDKEIVGLLEFIVENCRYYTKKVDVKFAPKYIHETKYPFYDDWRRFDEAWRYLQENQNKTSSKDRFVIDKSSLNEYYQPDKNEYKLDVDTQPIWDDFCRWYFLDRYKTANDKKSIRIKARKTFSLLAESGVQGKVFRAKRKIPTGYAYQALPMDNNVIAGDYANILLEANSKTLSLVPKSGISIEKQLDKKLDVIKKTDVRGLAIDNNSFFNADFDTHGIRLIVENTSVKVGNFPISAIDKSAKRMIFRALFEKEKGKRKKKTTISFKESGPVQDYLKVFLKKIVKIQLRTDGSISNIVVRKNAADFTLSFRSEHIQKLLK

SEQ ID NO: 341 - protein, 1146 aa, Alicyclobacillus hesperidum
MAYRLGLDIGITSVGWAVVALEKDESGLKPVRIQDLGVRIFDKAEDSKTGASLALPRREARSARRRTRRRRHRLWRVKRLLEQHGILSMEQIEALYAQRTSSPDVYALRVAGLDRCLIAEEIARVLIHIAHRRGFQSNRKSEIKDSDAGKLLKAVQENENLMQSKGYRTVAEMLVSEATKTDAEGKLVHGKKHGYVSNVRNKAGEYRHTVSRQAIVDEVRKIFAAQRALGNDVMSEELEDSYLKILCSQRNFDDGPGGDSPYGHGSVSPDGVRQSIYERMVGSCTFETGEKRAPRSSYSFERFQLLTKVVNLRIYRQQEDGGRYPCELTQTERARVIDCAYEQTKITYGKLRKLLDMKDTESFAGLTYGLNRSRNKTEDTVFVEMKFYHEVRKALQRAGVFIQDLSIETLDQIGWILSVWKSDDNRRKKLSTLGLSDNVIEELLPLNGSKFGHLSLKAIRKILPFLEDGYSYDVACELAGYQFQGKTEYVKQRLLPPLGEGEVTNPVVRRALSQAIKVVNAVIRKHGSPESIHIELARELSKNLDERRKIEKAQKENQKNNEQIKDEIREILGSAHVTGRDIVKYKLFKQQQEFCMYSGEKLDVTRLFEPGYAEVDHIIPYGISFDDSYDNKVLVKTEQNRQKGNRTPLEYLRDKPEQKAKFIALVESIPLSQKKKNHLLMDKRAIDLEQEGFRERNLSDTRYITRALMNHIQAWLLFDETASTRSKRVVCVNGAVTAYMRARWGLTKDRDAGDKHHAADAVVVACIGDSLIQRVTKYDKFKRNALADRNRYVQQVSKSEGITQYVDKETGEVFTWESFDERKFLPNEPLEPWPFFRDELLARLSDDPSKNIRAIGLLTYSETEQIDPIFVSRMPTRKVTGAAHKETIRSPRIVKVDDNKGTEIQVVVSKVALTELKLTKDGEIKDYFRPEDDPRLYNTLRERLVQFGGDAKAAFKEPVYKISKDGSVRTPVRKVKIQEKLTLGVPVHGGRGIAENGGMVRIDVFAKGGKYYFVPIYVADVLKRELPNRLATAHKPYSEWRVVDDSYQFKFSLYPNDAVMIKPSREVDITYKDRKEPVGCRIMYFVSANIASASISLRTHDNSGELEGLGIQGLEVFEKYVVGPLGDTHPVYKERRMPFRVERKMN

SEQ ID NO: 342 - protein, 1442 aa, Caenispirillum salinarum
MPVLSPLSPNAAQGRRRWSLALDIGEGSIGWAVAEVDAEGRVLQLTGTGVTLFPSAWSNENGTYVAHGAADRAVRGQQQRHDSRRRRLAGLARLCAPVLERSPEDLKDLTRTPPKADPRAIFFLRADAARRPLDGPELFRVLHHMAAHRGIRLAELQEVDPPPESDADDAAPAATEDEDGTRRAAADERAFRRLMAEHMHRHGTQPTCGEIMAGRLRETPAGAQPVTRARDGLRVGGGVAVPTRALIEQEFDAIRAIQAPRHPDLPWDSLRRLVLDQAPIAVPPATPCLFLEELRRRGETFQGRTITREAIDRGLTVDPLIQALRIRETVGNLRLHERITEPDGRQRYVPRAMPELGLSHGELTAPERDTLVRALMHDPDGLAAKDGRIPYTRLRKLIGYDNSPVCFAQERDTSGGGITVNPTDPLMARWIDGWVDLPLKARSLYVRDVVARGADSAALARLLAEGAHGVPPVAAAAVPAATAAILESDIMQPGRYSVCPWAAEAILDAWANAPTEGFYDVTRGLFGFAPGEIVLEDLRRARGALLAHLPRTMAAARTPNRAAQQRGPLPAYESVIPSQLITSLRRAHKGRAADWSAADPEERNPFLRTWTGNAATDHILNQVRKTANEVITKYGNRRGWDPLPSRITVELAREAKHGVIRRNEIAKENRENEGRRKKESAALDTFCQDNTVSWQAGGLPKERAALRLRLAQRQEFFCPYCAERPKLRATDLFSPAETEIDHVIERRMGGDGPDNLVLAHKDCNNAKGKKTPHEHAGDLLDSPALAALWQGWRKENADRLKGKGHKARTPREDKDFMDRVGWRFEEDARAKAEENQERRGRRMLHDTARATRLARLYLAAAVMPEDPAEIGAPPVETPPSPEDPTGYTAIYRTISRVQPVNGSVTHMLRQRLLQRDKNRDYQTHHAEDACLLLLAGPAVVQAFNTEAAQHGADAPDDRPVDLMPTSDAYHQQRRARALGRVPLATVDAALADIVMPESDRQDPETGRVHWRLTRAGRGLKRRIDDLTRNCVILSRPRRPSETGTPGALHNATHYGRREITVDGRTDTVVTQRMNARDLVALLDNAKIVPAARLDAAAPGDTILKEICTEIADRHDRVVDPEGTHARRWISARLAALVPAHAEAVARDIAELADLDALADADRTPEQEARRSALRQSPYLGRAISAKKADGRARAREQEILTRALLDPHWGPRGLRHLIMREARAPSLVRIRANKTDAFGRPVPDAAVWVKTDGNAVSQLWRLTSVVTDDGRRIPLPKPIEKRIEISNLEYARLNGLDEGAGVTGNNAPPRPLRQDIDRLTPLWRDHGTAPGGYLGTAVGELEDKARSALRGKAMRQTLTDAGITAEAGWRLDSEGAVCDLEVAKGDTVKKDGKTYKVGVITQGIFGMPVDAAGSAPRTPEDCEKFEEQYGIKPWKAKGIPLA

SEQ ID NO: 343 - protein, 1114 aa, Eubacterium rectale
MNYTEKEKLFMKYILALDIGIASVGWAILDKESETVIEAGSNIFPEASAADNQLRRDMRGAKRNNRRLKTRINDFIKLWENNNLSIPQFKSTEIVGLKVRAITEEITLDELYLILYSYLKHRGISYLEDALDDTVSGSSAYANGLKLNAKELETHYPCEIQQERLNTIGKYRGQSQIINENGEVLDLSNVFTIGAYRKEIQRVFEIQKKYHPELTDEFCDGYMLIFNRKRKYYEGPGNEKSRTDYGRFTTKLDANGNYITEDNIFEKLIGKCSVYPDELRAAAASYTAQEYNVLNDLNNLTINGRKLEENEKHEIVERIKSSNTINMRKIISDCMGENIDDFAGARIDKSGKEIFHKFEVYNKMRKALLEIGIDISNYSREELDEIGYIMTINTDKEAMMEAFQKSWIDLSDDVKQCLINMRKTNGALFNKWQSFSLKIMNELIPEMYAQPKEQMTLLTEMGVTKGTQEEFAGLKYIPVDVVSEDIFNPVVRRSVRISFKILNAVLKKYKALDTIVIEMPRDRNSEEQKKRINDSQKLNEKEMEYIEKKLAVTYGIKLSPSDFSSQKQLSLKLKLWNEQDGICLYSGKTIDPNDIINNPQLFEIDHIIPRSISFDDARSNKVLVYRSENQKKGNQTPYYYLTHSHSEWSFEQYKATVMNLSKKKEYAISRKKIQNLLYSEDITKMDVLKGFINRNINDTSYASRLVLNTIQNFFMANEADTKVKVIKGSYTHQMRCNLKLDKNRDESYSHHAVDAMLIGYSELGYEAYHKLQGEFIDFETGEILRKDMWDENMSDEVYADYLYGKKWANIRNEVVKAEKNVKYWHYVMRKSNRGLCNQTIRGTREYDGKQYKINKLDIRTKEGIKVFAKLAFSKKDSDRERLLVYLNDRRTFDDLCKIYEDYSDAANPFVQYEKETGDIIRKYSKKHNGPRIDKLKYKDGEVGACIDISHKYGFEKGSKKVILESLVPYRMDVYYKEENHSYYLVGVKQSDIKFEKGRNVIDEEAYARILVNEKMIQPGQSRADLENLGFKFKLSFYKNDIIEYEKDGKIYTERLVSRTMPKQRNYIETKPIDKAKFEKQNLVGLGKTKFIKKYRYDILGNKYSCSEEKFTSFC

SEQ ID NO: 344 - protein, 1314 aa, Mycoplasma synoviae
MLRLYCANNLVLNNVQNLWKYLLLLIFDKKIIFLFKIKVILIRRYMENNNKEKIVIGFDLGVASVGWSIVNAETKEVIDLGVRLFSEPEKADYRRAKRTTRRLLRRKKFKREKFHKLILKNAEIFGLQSRNEILNVYKDQSSKYRNILKLKINALKEEIKPSELVWILRDYLQNRGYFYKNEKLTDEFVSNSFPSKKLHEHYEKYGFFRGSVKLDNKLDNKKDKAKEKDEEEESDAKKESEELIFSNKQWINEIVKVFENQSYLTESFKEEYLKLFNYVRPFNKGPGSKNSRTAYGVFSTDIDPETNKFKDYSNIWDKTIGKCSLFEEEIRAPKNLPSALIFNLQNEICTIKNEFTEFKNWWLNAEQKSEILKFVFTELFNWKDKKYSDKKFNKNLQDKIKKYLLNFALENFNLNEEILKNRDLENDTVLGLKGVKYYEKSNATADAALEFSSLKPLYVFIKFLKEKKLDLNYLLGLENTEILYFLDSIYLAISYSSDLKERNEWFKKLLKELYPKIKNNNLEIIENVEDIFEITDQEKFESFSKTHSLSREAFNHIIPLLLSNNEGKNYESLKHSNEELKKRTEKAELKAQQNQKYLKDNFLKEALVPLSVKTSVLQAIKIFNQIIKNFGKKYEISQVVIEMARELTKPNLEKLLNNATNSNIKILKEKLDQTEKFDDFTKKKFIDKIENSVVFRNKLFLWFEQDRKDPYTQLDIKINEIEDETEIDHVIPYSKSADDSWFNKLLVKKSTNQLKKNKTVWEYYQNESDPEAKWNKFVAWAKRIYLVQKSDKESKDNSEKNSIFKNKKPNLKFKNITKKLFDPYKDLGFLARNLNDTRYATKVFRDQLNNYSKHHSKDDENKLFKVVCMNGSITSFLRKSMWRKNEEQVYRFNFWKKDRDQFFHHAVDASIIAIFSLLTKTLYNKLRVYESYDVQRREDGVYLINKETGEVKKADKDYWKDQHNFLKIRENAIEIKNVLNNVDFQNQVRYSRKANTKLNTQLFNETLYGVKEFENNFYKLEKVNLFSRKDLRKFILEDLNEESEKNKKNENGSRKRILTEKYIVDEILQILENEEFKDSKSDINALNKYMDSLPSKFSEFFSQDFINKCKKENSLILTFDAIKHNDPKKVIKIKNLKFFREDATLKNKQAVHKDSKNQIKSFYESYKCVGFIWLKNKNDLEESIFVPINSRVIHFGDKDKDIFDFDSYNKEKLLNEINLKRPENKKFNSINEIEFVKFVKPGALLLNFENQQIYYISTLESSSLRAKIKLLNKMDKGKAVSMKKITNPDEYKIIEHVNPLGINLNWTKKLENNN

SEQ ID NO: 345 - protein, 1197 aa, Porphyromonas sp.
MLMSKHVLGLDLGVGSIGWCLIALDAQGDPAEILGMGSRVVPLNNATKAIEAFNAGAAFTASQERTARRTMRRGFARYQLRRYRLRRELEKVGMLPDAALIQLPLLELWELRERAATAGRRLTLPELGRVLCHINQKRGYRHVKSDAAAIVGDEGEKKKDSNSAYLAGIRANDEKLQAEHKTVGQYFAEQLRQNQSESPTGGISYRIKDQIFSRQCYIDEYDQIMAVQRVHYPDILTDEFIRMLRDEVIFMQRPLKSCKHLVSLCEFEKQERVMRVQQDDGKGGWQLVERRVKFGPKVAPKSSPLFQLCCIYEAVNNIRLTRPNGSPCDITPEERAKIVAHLQSSASLSFAALKKLLKEKALIADQLTSKSGLKGNSTRVALASALQPYPQYHHLLDMELETRMMTVQLTDEETGEVTEREVAVVTDSYVRKPLYRLWHILYSIEEREAMRRALITQLGMKEEDLDGGLLDQLYRLDFVKPGYGNKSAKFICKLLPQLQQGLGYSEACAAVGYRHSNSPTSEEITERTLLEKIPLLQRNELRQPLVEKILNQMINLVNALKAEYGIDEVRVELARELKMSREERERMARNNKDREERNKGVAAKIRECGLYPTKPRIQKYMLWKEAGRQCLYCGRSIEEEQCLREGGMEVEHIIPKSVLYDDSYGNKTCACRRCNKEKGNRTALEYIRAKGREAEYMKRINDLLKEKKISYSKHQRLRWLKEDIPSDFLERQLRLTQYISRQAMAILQQGIRRVSASEGGVTARLRSLWGYGKILHTLNLDRYDSMGETERVSREGEATEELHITNWSKRMDHRHHAIDALVVACTRQSYIQRLNRLSSEFGREDKKKEDQEAQEQQATETGRLSNLERWLTQRPHFSVRTVSDKVAEILISYRPGQRVVTRGRNIYRKKMADGREVSCVQRGVLVPRGELMEASFYGKILSQGRVRIVKRYPLHDLKGEVVDPHLRELITTYNQELKSREKGAPIPPLCLDKDKKQEVRSVRCYAKTLSLDKAIPMCFDEKGEPTAFVKSASNHHLALYRTPKGKLVESIVTFWDAVDRARYGIPLVITHPREVMEQVLQRGDIPEQVLSLLPPSDWVFVDSLQQDEMVVIGLSDEELQRALEAQNYRKISEHLYRVQKMSSSYYVFRYHLETSVADDKNTSGRIPKFHRVQSLKAYEERNIRKVRVDLLGRISLL

SEQ ID NO: 346 - protein, 1121 aa, Streptococcus thermophilus
MSDLVLGLDIGIGSVGVGILNKVTGEIIHKNSRIFPAAQAENNLVRRTNRQGRRLARRKKHRRVRLNRLFEESGLITDFTKISINLNPYQLRVKGLTDELSNEELFIALKNMVKHRGISYLDDASDDGNSSVGDYAQIVKENSKQLETKTPGQIQLERYQTYGQLRGDFTVEKDGKKHRLINVFPTSAYRSEALRILQTQQEFNPQITDEFINRYLEILTGKRKYYHGPGNEKSRTDYGRYRTSGETLDNIFGILIGKCTFYPDEFRAAKASYTAQEFNLLNDLNNLTVPTETKKLSKEQKNQIINYVKNEKAMGPAKLFKYIAKLLSCDVADIKGYRIDKSGKAEIHTFEAYRKMKTLETLDIEQMDRETLDKLAYVLTLNTEREGIQEALEHEFADGSFSQKQVDELVQFRKANSSIFGKGWHNFSVKLMMELIPELYETSEEQMTILTRLGKQKTTSSSNKTKYIDEKLLTEEIYNPVVAKSVRQAIKIVNAAIKEYGDFDNIVIEMARETNEDDEKKAIQKIQKANKDEKDAAMLKAANQYNGKAELPHSVFHGHKQLATKIRLWHQQGERCLYTGKTISIHDLINNSNQFEVDHILPLSITFDDSLANKVLVYATANQEKGQRTPYQALDSMDDAWSFRELKAFVRESKTLSNKKKEYLLTEEDISKFDVRKKFIERNLVDTRYASRVVLNALQEHFRAHKIDTKVSVVRGQFTSQLRRHWGIEKTRDTYHHHAVDALIIAASSQLNLWKKQKNTLVSYSEDQLLDIETGELISDDEYKESVFKAPYQHFVDTLKSKEFEDSILFSYQVDSKFNRKISDATIYATRQAKVGKDKADETYVLGKIKDIYTQDGYDAFMKIYKKDKSKFLMYRHDPQTFEKVIEPILENYPNKQINEKGKEVPCNPFLKYKEEHGYIRKYSKKGNGPEIKSLKYYDSKLGNHIDITPKDSNNKVVLQSVSPWRADVYFNKTTGKYEILGLKYADLQFEKGTGTYKISQEKYNDIKKKEGVDSDSEFKFTLYKNDLLLVKDTETKEQQLFRFLSRTMPKQKHYVELKPYDKQKFEGGEALIKVLGNVANSGQCKKGLGKSNISIYKVRTDVLGNQHIIKNEGDKPKLDF

SEQ ID NO: 347 - protein, 1152 aa, Roseburia inulinivorans
MNAEHGKEGLLIMEENFQYRIGLDIGITSVGWAVLQNNSQDEPVRITDLGVRIFDVAENPKNGDALAAPRRDARTTRRRLRRRRHRLERIKFLLQENGLIEMDSFMERYYKGNLPDVYQLRYEGLDRKLKDEELAQVLIHIAKHRGFRSTRKAETKEKEGGAVLKATTENQKIMQEKGYRTVGEMLYLDEAFHTECLWNEKGYVLTPRNRPDDYKHTILRSMLVEEVHAIFAAQRAHGNQKATEGLEEAYVEIMTSQRSFDMGPGLQPDGKPSPYAMEGFGDRVGKCTFEKDEYRAPKATYTAELFVALQKINHTKLIDEFGTGRFFSEEERKTIIGLLLSSKELKYGTIRKKLNIDPSLKFNSLNYSAKKEGETEEERVLDTEKAKFASMFWTYEYSKCLKDRTEEMPVGEKADLFDRIGEILTAYKNDDSRSSRLKELGLSGEEIDGLLDLSPAKYQRVSLKAMRKMQPYLEDGLIYDKACEAAGYDFRALNDGNKKHLLKGEEINAIVNDITNPVVKRSVSQTIKVINAIIQKYGSPQAVNIELAREMSKNFQDRTNLEKEMKKRQQENERAKQQIIELGKQNPTGQDILKYRLWNDQGGYCLYSGKKIPLEELFDGGYDIDHILPYSITFDDSYRNKVLVTAQENRQKGNRTPYEYFGADEKRWEDYEASVRLLVRDYKKQQKLLKKNFTEEERKEFKERNLNDTKYITRVVYNMIRQNLELEPFNHPEKKKQVWAVNGAVTSYLRKRWGLMQKDRSTDRHHAMDAVVIACCTDGMIHKISRYMQGRELAYSRNFKFPDEETGEILNRDNFTREQWDEKFGVKVPLPWNSFRDELDIRLLNEDPKNFLLTHADVQRELDYPGWMYGEEESPIEEGRYINYIRPLFVSRMPNHKVTGSAHDATIRSARDYETRGVVITKVPLTDLKLNKDNEIEGYYDKDSDRLLYQALVRQLLLHGNDGKKAFAEDFHKPKADGTEGPVVRKVKIEKKQTSGVMVRGGTGIAANGEMVRIDVFRENGKYYFVPVYTADVVRKVLPNRAATHTKPYSEWRVMDDANFVFSLYSRDLIHVKSKKDIKTNLVNGGLLLQKEIFAYYTGADIATASIAGFANDSNFKFRGLGIQSLEIFEKCQVDILGNISVVRHENRQEFH

SEQ ID NO: 348 - protein, 1082 aa, Methylosinus trichosporium
MRVLGLDAGIASLGWALIEIEESNRGELSQGTIIGAGTWMFDAPEEKTQAGAKLKSEQRRTFRGQRRVVRRRRQRMNEVRRILHSHGLLPSSDRDALKQPGLDPWRIRAEALDRLLGPVELAVALGHIARHRGFKSNSKGAKTNDPADDTSKMKRAVNETREKLARFGSAAKMLVEDESFVLRQTPTKNGASEIVRRFRNREGDYSRSLLRDDLAAEMRALFTAQARFQSAIATADLQTAFTKAAFFQRPLQDSEKLVGPCPFEVDEKRAPKRGYSFELFRFLSRLNHVTLRDGKQERTLTRDELALAAADFGAAAKVSFTALRKKLKLPETTVFVGVKADEESKLDVVARSGKAAEGTARLRSVIVDALGELAWGALLCSPEKLDKIAEVISFRSDIGRISEGLAQAGCNAPLVDALTAAASDGRFDPFTGAGHISSKAARNILSGLRQGMTYDKACCAADYDHTASRERGAFDVGGHGREALKRILQEERISRELVGSPTARKALIESIKQVKAIVERYGVPDRIHVELARDVGKSIEEREEITRGIEKRNRQKDKLRGLFEKEVGRPPQDGARGKEELLRFELWSEQMGRCLYTDDYISPSQLVATDDAVQVDHILPWSRFADDSYANKTLCMAKANQDKKGRTPYEWFKAEKTDTEWDAFIVRVEALADMKGFKKRNYKLRNAEEAAAKFRNRNLNDTRWACRLLAEALKQLYPKGEKDKDGKERRRVFSRPGALTDRLRRAWGLQWMKKSTKGDRIPDDRHHALDAIVIAATTESLLQRATREVQEIEDKGLHYDLVKNVTPPWPGFREQAVEAVEKVFVARAERRRARGKAHDATIRHIAVREGEQRVYERRKVAELKLADLDRVKDAERNARLIEKLRNWIEAGSPKDDPPLSPKGDPIFKVRLVTKSKVNIALDTGNPKRPGTVDRGEMARVDVFRKASKKGKYEYYLVPIYPHDIATMKTPPIRAVQAYKPEDEWPEMDSSYEFCWSLVPMTYLQVISSKGEIFEGYYRGMNRSVGAIQLSAHSNSSDVVQGIGARTLTEFKKFNVDRFGRKHEVERELRTWRGETWRGKAYI

SEQ ID NO: 349 - protein, 1156 aa, Ruminococcus albus
MGNYYLGLDVGIGSIGWAVINIEKKRIEDFNVRIFKSGEIQEKNRNSRASQQCRRSRGLRRLYRRKSHRKLRLKNYLSIIGLTTSEKIDYYYETADNNVIQLRNKGLSEKLTPEEIAACLIHICNNRGYKDFYEVNVEDIEDPDERNEYKEEHDSIVLISNLMNEGGYCTPAEMICNCREFDEPNSVYRKFHNSAASKNHYLITRHMLVKEVDLILENQSKYYGILDDKTIAKIKDIIFAQRDFEIGPGKNERFRRFTGYLDSIGKCQFFKDQERGSRFTVIADIYAFVNVLSQYTYTNNRGESVFDTSFANDLINSALKNGSMDKRELKAIAKSYHIDISDKNSDTSLTKCFKYIKVVKPLFEKYGYDWDKLIENYTDTDNNVLNRIGIVLSQAQTPKRRREKLKALNIGLDDGLINELTKLKLSGTANVSYKYMQGSIEAFCEGDLYGKYQAKFNKEIPDIDENAKPQKLPPFKNEDDCEFFKNPVVFRSINETRKLINAIIDKYGYPAAVNIETADELNKTFEDRAIDTKRNNDNQKENDRIVKEIIECIKCDEVHARHLIEKYKLWEAQEGKCLYSGETITKEDMLRDKDKLFEVDHIVPYSLILDNTINNKALVYAEENQKKGQRTPLMYMNEAQAADYRVRVNTMFKSKKCSKKKYQYLMLPDLNDQELLGGWRSRNLNDTRYICKYLVNYLRKNLRFDRSYESSDEDDLKIRDHYRVFPVKSRFTSMFRRWWLNEKTWGRYDKAELKKLTYLDHAADAIIIANCRPEYVVLAGEKLKLNKMYHQAGKRITPEYEQSKKACIDNLYKLFRMDRRTAEKLLSGHGRLTPIIPNLSEEVDKRLWDKNIYEQFWKDDKDKKSCEELYRENVASLYKGDPKFASSLSMPVISLKPDHKYRGTITGEEAIRVKEIDGKLIKLKRKSISEITAESINSIYTDDKILIDSLKTIFEQADYKDVGDYLKKTNQHFFTTSSGKRVNKVTVIEKVPSRWLRKEIDDNNFSLLNDSSYYCIELYKDSKGDNNLQGIAMSDIVHDRKTKKLYLKPDFNYPDDYYTHVMYIFPGDYLRIKSTSKKSGEQLKFEGYFISVKNVNENSFRFISDNKPCAKDKRVSITKKDIVIKLAVDLMGKVQGENNGKGISCGEPLSLLKEKN

SEQ ID NO: 350 - protein, 1187 aa, Bifidobacterium longum
MLSRQLLGASHLARPVSYSYNVQDNDVHCSYGERCFMRGKRYRIGIDVGLNSVGLAAVEVSDENSPVRLLNAQSVIHDGGVDPQKNKEAITRKNMSGVARRTRRMRRRKRERLHKLDMLLGKFGYPVIEPESLDKPFEEWHVRAELATRYIEDDELRRESISIALRHMARHRGWRNPYRQVDSLISDNPYSKQYGELKEKAKAYNDDATAAEEESTPAQLVVAMLDAGYAEAPRLRWRTGSKKPDAEGYLPVRLMQEDNANELKQIFRVQRVPADEWKPLFRSVFYAVSPKGSAEQRVGQDPLAPEQARALKASLAFQEYRIANVITNLRIKDASAELRKLTVDEKQSIYDQLVSPSSEDITWSDLCDFLGFKRSQLKGVGSLTEDGEERISSRPPRLTSVQRIYESDNKIRKPLVAWWKSASDNEHEAMIRLLSNTVDIDKVREDVAYASAIEFIDGLDDDALTKLDSVDLPSGRAAYSVETLQKLTRQMLTTDDDLHEARKTLFNVTDSWRPPADPIGEPLGNPSVDRVLKNVNRYLMNCQQRWGNPVSVNIEHVRSSFSSVAFARKDKREYEKNNEKRSIFRSSLSEQLRADEQMEKVRESDLRRLEAIQRQNGQCLYCGRTITFRTCEMDHIVPRKGVGSTNTRTNFAAVCAECNRMKSNTPFAIWARSEDAQTRGVSLAEAKKRVTMFTFNPKSYAPREVKAFKQAVIARLQQTEDDAAIDNRSIESVAWMADELHRRIDWYFNAKQYVNSASIDDAEAETMKTTVSVFQGRVTASARRAAGIEGKIHFIGQQSKTRLDRRHHAVDASVIAMMNTAAAQTLMERESLRESQRLIGLMPGERSWKEYPYEGTSRYESFHLWLDNMDVLLELLNDALDNDRIAVMQSQRYVLGNSIAHDATIHPLEKVPLGSAMSADLIRRASTPALWCALTRLPDYDEKEGLPEDSHREIRVHDTRYSADDEMGFFASQAAQIAVQEGSADIGSAIHHARVYRCWKTNAKGVRKYFYGMIRVFQTDLLRACHDDLFTVPLPPQSISMRYGEPRVVQALQSGNAQYLGSLVVGDEIEMDFSSLDVDGQIGEYLQFFSQFSGGNLAWKHWVVDGFFNQTQLRIRPRYLAAEGLAKAFSDDVVPDGVQKIVTKQGWLPPVNTASKTAVRIVRRNAFGEPRLSSAHHMPCSWQWRHE

SEQ ID NO: 351 - protein, 1150 aa, Enterococcus faecalis
MYSIGLDLGISSVGWSVIDERTGNVIDLGVRLFSAKNSEKNLERRTNRGGRRLIRRKTNRLKDAKKILAAVGFYEDKSLKNSCPYQLRVKGLTEPLSRGEIYKVTLHILKKRGISYLDEVDTEAAKESQDYKEQVRKNAQLLTKYTPGQIQLQRLKENNRVKTGINAQGNYQLNVFKVSAYANELATILKTQQAFYPNELTDDWIALFVQPGIAEEAGLIYRKRPYYHGPGNEANNSPYGRWSDFQKTGEPATNIFDKLIGKDFQGELRASGLSLSAQQYNLLNDLTNLKIDGEVPLSSEQKEYILTELMTKEFTRFGVNDVVKLLGVKKERLSGWRLDKKGKPEIHTLKGYRNWRKIFAEAGIDLATLPTETIDCLAKVLTLNTEREGIENTLAFELPELSESVKLLVLDRYKELSQSISTQSWHRFSLKTLHLLIPELMNATSEQNTLLEQFQLKSDVRKRYSEYKKLPTKDVLAEIYNPTVNKTVSQAFKVIDALLVKYGKEQIRYITIEMPRDDNEEDEKKRIKELHAKNSQRKNDSQSYFMQKSGWSQEKFQTTIQKNRRFLAKLLYYYEQDGICAYTGLPISPELLVSDSTEIDHIIPISISLDDSINNKVLVLSKANQVKGQQTPYDAWMDGSFKKINGKFSNWDDYQKWVESRHFSHKKENNLLETRNIFDSEQVEKFLARNLNDTRYASRLVLNTLQSFFTNQETKVRVVNGSFTHTLRKKWGADLDKTRETHHHHAVDATLCAVTSFVKVSRYHYAVKEETGEKVMREIDFETGEIVNEMSYWEFKKSKKYERKTYQVKWPNFREQLKPVNLHPRIKFSHQVDRKANRKLSDATIYSVREKTEVKTLKSGKQKITTDEYTIGKIKDIYTLDGWEAFKKKQDKLLMKDLDEKTYERLLSIAETTPDFQEVEEKNGKVKRVKRSPFAVYCEENDIPAIQKYAKKNNGPLIRSLKYYDGKLNKHINITKDSQGRPVEKTKNGRKVTLQSLKPYRYDIYQDLETKAYYTVQLYYSDLRFVEGKYGITEKEYMKKVAEQTKGQVVRFCFSLQKNDGLEIEWKDSQRYDVRFYNFQSANSINFKGLEQEMMPAENQFKQKPYNNGAINLNIAKYGKEGKKLRKFNTDILGKKHYLFYEKEPKNIIK

SEQ ID NO: 352 - protein, 1236 aa, Mycoplasma mobile
MYFYKNKENKLNKKVVLGLDLGIASVGWCLTDISQKEDNKFPIILHGVRLFETVDDSDDKLLNETRRKKRGQRRRNRRLFTRKRDFIKYLIDNNIIELEFDKNPKILVRNFIEKYINPFSKNLELKYKSVTNLPIGFHNLRKAAINEKYKLDKSELIVLLYFYLSLRGAFFDNPEDTKSKEMNKNEIEIFDKNESIKNAEFPIDKIIEFYKISGKIRSTINLKFGHQDYLKEIKQVFEKQNIDFMNYEKFAMEEKSFFSRIRNYSEGPGNEKSFSKYGLYANENGNPELIINEKGQKIYTKIFKTLWESKIGKCSYDKKLYRAPKNSFSAKVFDITNKLTDWKHKNEYISERLKRKILLSRFLNKDSKSAVEKILKEENIKFENLSEIAYNKDDNKINLPIINAYHSLTTIFKKHLINFENYLISNENDLSKLMSFYKQQSEKLFVPNEKGSYEINQNNNVLHIFDAISNILNKFSTIQDRIRILEGYFEFSNLKKDVKSSEIYSEIAKLREFSGTSSLSFGAYYKFIPNLISEGSKNYSTISYEEKALQNQKNNFSHSNLFEKTWVEDLIASPTVKRSLRQTMNLLKEIFKYSEKNNLEIEKIVVEVTRSSNNKHERKKIEGINKYRKEKYEELKKVYDLPNENTTLLKKLWLLRQQQGYDAYSLRKIEANDVINKPWNYDIDHIVPRSISFDDSFSNLVIVNKLDNAKKSNDLSAKQFIEKIYGIEKLKEAKENWGNWYLRNANGKAFNDKGKFIKLYTIDNLDEFDNSDFINRNLSDTSYITNALVNHLTFSNSKYKYSVVSVNGKQTSNLRNQIAFVGIKNNKETEREWKRPEGFKSINSNDFLIREEGKNDVKDDVLIKDRSFNGHHAEDAYFITIISQYFRSFKRIERLNVNYRKETRELDDLEKNNIKFKEKASFDNFLLINALDELNEKLNQMRFSRMVITKKNTQLFNETLYSGKYDKGKNTIKKVEKLNLLDNRTDKIKKIEEFFDEDKLKENELTKLHIFNHDKNLYETLKIIWNEVKIEIKNKNLNEKNYFKYFVNKKLQEGKISFNEWVPILDNDFKIIRKIRYIKFSSEEKETDEIIFSQSNFLKIDQRQNFSFHNTLYWVQIWVYKNQKDQYCFISIDARNSKFEKDEIKINYEKLKTQKEKLQIINEEPILKINKGDLFENEEKELFYIVGRDEKPQKLEIKYILGKKIKDQKQIQKPVKKYFPNWKKVNLTYMGEIFKK

SEQ ID NO: 353 - protein, 1105 aa, Actinomyces coleocanis
MDNKNYRIGIDVGLNSIGFCAVEVDQHDTPLGFLNLSVYRHDAGIDPNGKKTNTTRLAMSGVARRTRRLFRKRKRRLAALDRFIEAQGWTLPDHADYKDPYTPWLVRAELAQTPIRDENDLHEKLAIAVRHIARHRGWRSPWVPVRSLHVEQPPSDQYLALKERVEAKTLLQMPEGATPAEMVVALDLSVDVNLRPKNREKTDTRPENKKPGFLGGKLMQSDNANELRKIAKIQGLDDALLRELIELVFAADSPKGASGELVGYDVLPGQHGKRRAEKAHPAFQRYRIASIVSNLRIRHLGSGADERLDVETQKRVFEYLLNAKPTADITWSDVAEEIGVERNLLMGTATQTADGERASAKPPVDVTNVAFATCKIKPLKEWWLNADYEARCVMVSALSHAEKLTEGTAAEVEVAEFLQNLSDEDNEKLDSFSLPIGRAAYSVDSLERLTKRMIENGEDLFEARVNEFGVSEDWRPPAEPIGARVGNPAVDRVLKAVNRYLMAAEAEWGAPLSVNIEHVREGFISKRQAVEIDRENQKRYQRNQAVRSQIADHINATSGVRGSDVTRYLAIQRQNGECLYCGTAITFVNSEMDHIVPRAGLGSTNTRDNLVATCERCNKSKSNKPFAVWAAECGIPGVSVAEALKRVDFWIADGFASSKEHRELQKGVKDRLKRKVSDPEIDNRSMESVAWMARELAHRVQYYFDEKHTGTKVRVFRGSLTSAARKASGFESRVNFIGGNGKTRLDRRHHAMDAATVAMLRNSVAKTLVLRGNIRASERAIGAAETWKSFRGENVADRQIFESWSENMRVLVEKFNLALYNDEVSIFSSLRLQLGNGKAHDDTITKLQMHKVGDAWSLTEIDRASTPALWCALTRQPDFTWKDGLPANEDRTIIVNGTHYGPLDKVGIFGKAAASLLVRGGSVDIGSAIHHARIYRIAGKKPTYGMVRVFAPDLLRYRNEDLFNVELPPQSVSMRYAEPKVREAIREGKAEYLGWLVVGDELLLDLSSETSGQIAELQQDFPGTTHWTVAGFFSPSRLRLRPVYLAQEGLGEDVSEGSKSIIAGQGWRPAVNKVFGSAMPEVIRRDGLGRKRRFSYSGLPVSWQG

SEQ ID NO: 354 - protein, 1079 aa, Dinoroseobacter shibae
MRLGLDIGTSSIGWWLYETDGAGSDARITGVVDGGVRIFSDGRDPKSGASLAVDRRAARAMRRRRDRYLRRRATLMKVLAETGLMPADPAEAKALEALDPFALRAAGLDEPLPLPHLGRALFHLNQRRGFKSNRKTDRGDNESGKIKDATARLDMEMMANGARTYGEFLHKRRQKATDPRHVPSVRTRLSIANRGGPDGKEEAGYDFYPDRRHLEEEFHKLWAAQGAHHPELTETLRDLLFEKIFFQRPLKEPEVGLCLFSGHHGVPPKDPRLPKAHPLTQRRVLYETVNQLRVTADGREARPLTREERDQVIHALDNKKPTKSLSSMVLKLPALAKVLKLRDGERFTLETGVRDAIACDPLRASPAHPDRFGPRWSILDADAQWEVISRIRRVQSDAEHAALVDWLTEAHGLDRAHAEATAHAPLPDGYGRLGLTATTRILYQLTADVVTYADAVKACGWHHSDGRTGECFDRLPYYGEVLERHVIPGSYHPDDDDITRFGRITNPTVHIGLNQLRRLVNRIIETHGKPHQIVVELARDLKKSEEQKRADIKRIRDTTEAAKKRSEKLEELEIEDNGRNRMLLRLWEDLNPDDAMRRFCPYTGTRISAAMIFDGSCDVDHILPYSRTLDDSFPNRTLCLREANRQKRNQTPWQAWGDTPHWHAIAANLKNLPENKRWRFAPDAMTRFEGENGFLDRALKDTQYLARISRSYLDTLFTKGGHVWVVPGRFTEMLRRHWGLNSLLSDAGRGAVKAKNRTDHRHHAIDAAVIAATDPGLLNRISRAAGQGEAAGQSAELIARDTPPPWEGFRDDLRVRLDRIIVSHRADHGRIDHAARKQGRDSTAGQLHQETAYSIVDDIHVASRTDLLSLKPAQLLDEPGRSGQVRDPQLRKALRVATGGKTGKDFENALRYFASKPGPYQAIRRVRIIKPLQAQARVPVPAQDPIKAYQGGSNHLFEIWRLPDGEIEAQVITSFEAHTLEGEKRPHPAAKRLLRVHKGDMVALERDGRRVVGHVQKMDIANGLFIVPHNEANADTRNNDKSDPFKWIQIGARPAIASGIRRVSVDEIGRLRDGGTRPI

SEQ ID NO: 355 - protein, 1181 aa, Actinomyces sp.
MLHCIAVIRVPPSEEPGFFETHADSCALCHHGCMTYAANDKAIRYRVGIDVGLRSIGFCAVEVDDEDHPIRILNSVVHVHDAGTGGPGETESLRKRSGVAARARRRGRAEKQRLKKLDVLLEELGWGVSSNELLDSHAPWHIRKRLVSEYIEDETERRQCLSVAMAHIARHRGWRNSFSKVDTLLLEQAPSDRMQGLKERVEDRTGLQFSEEVTQGELVATLLEHDGDVTIRGFVRKGGKATKVHGVLEGKYMQSDLVAELRQICRTQRVSETTFEKLVLSIFHSKEPAPSAARQRERVGLDELQLALDPAAKQPRAERAHPAFQKFKVVATLANMRIREQSAGERSLTSEELNRVARYLLNHTESESPTWDDVARKLEVPRHRLRGSSRASLETGGGLTYPPVDDTTVRVMSAEVDWLADWWDCANDESRGHMIDAISNGCGSEPDDVEDEEVNELISSATAEDMLKLELLAKKLPSGRVAYSLKTLREVTAAILETGDDLSQAITRLYGVDPGWVPTPAPIEAPVGNPSVDRVLKQVARWLKFASKRWGVPQTVNIEHTREGLKSASLLEEERERWERFEARREIRQKEMYKRLGISGPFRRSDQVRYEILDLQDCACLYCGNEINFQTFEVDHIIPRVDASSDSRRTNLAAVCHSCNSAKGGLAFGQWVKRGDCPSGVSLENAIKRVRSWSKDRLGLTEKAMGKRKSEVISRLKTEMPYEEFDGRSMESVAWMAIELKKRIEGYFNSDRPEGCAAVQVNAYSGRLTACARRAAHVDKRVRLIRLKGDDGHHKNRFDRRNHAMDALVIALMTPAIARTIAVREDRREAQQLTRAFESWKNFLGSEERMQDRWESWIGDVEYACDRLNELIDADKIPVTENLRLRNSGKLHADQPESLKKARRGSKRPRPQRYVLGDALPADVINRVTDPGLWTALVRAPGFDSQLGLPADLNRGLKLRGKRISADFPIDYFPTDSPALAVQGGYVGLEFHHARLYRIIGPKEKVKYALLRVCAIDLCGIDCDDLFEVELKPSSISMRTADAKLKEAMGNGSAKQIGWLVLGDEIQIDPTKFPKQSIGKFLKECGPVSSWRVSALDTPSKITLKPRLLSNEPLLKTSRVGGHESDLVVAECVEKIMKKTGWVVEINALCQSGLIRVIRRNALGEVRTSPKSGLPISLNLR

SEQ ID NO: 356 - protein, 1113 aa, Alcanivorax sp.
MRYRVGLDLGTASVGAAVFSMDEQGNPMELIWHYERLFSEPLVPDMGQLKPKKAARRLARQQRRQIDRRASRLRRIAIVSRRLGIAPGRNDSGVHGNDVPTLRAMAVNERIELGQLRAVLLRMGKKRGYGGTFKAVRKVGEAGEVASGASRLEEEMVALASVQNKDSVTVGEYLAARVEHGLPSKLKVAANNEYYAPEYALFRQYLGLPAIKGRPDCLPNMYALRHQIEHEFERIWATQSQFHDVMKDHGVKEEIRNAIFFQRPLKSPADKVGRCSLQTNLPRAPRAQIAAQNFRIEKQMADLRWGMGRRAEMLNDHQKAVIRELLNQQKELSFRKIYKELERAGCPGPEGKGLNMDRAALGGRDDLSGNTTLAAWRKLGLEDRWQELDEVTQIQVINFLADLGSPEQLDTDDWSCRFMGKNGRPRNFSDEFVAFMNELRMTDGFDRLSKMGFEGGRSSYSIKALKALTEWMIAPHWRETPETHRVDEEAAIRECYPESLATPAQGGRQSKLEPPPLTGNEVVDVALRQVRHTINMMIDDLGSVPAQIVVEMAREMKGGVTRRNDIEKQNKRFASERKKAAQSIEENGKTPTPARILRYQLWIEQGHQCPYCESNISLEQALSGAYTNFEHILPRTLTQIGRKRSELVLAHRECNDEKGNRTPYQAFGHDDRRWRIVEQRANALPKKSSRKTRLLLLKDFEGEALTDESIDEFADRQLHESSWLAKVTTQWLSSLGSDVYVSRGSLTAELRRRWGLDTVIPQVRFESGMPVVDEEGAEITPEEFEKFRLQWEGHRVTREMRTDRRPDKRIDHRHHLVDAIVTALTSRSLYQQYAKAWKVADEKQRHGRVDVKVELPMPILTIRDIALEAVRSVRISHKPDRYPDGRFFEATAYGIAQRLDERSGEKVDWLVSRKSLTDLAPEKKSIDVDKVRANISRIVGEAIRLHISNIFEKRVSKGMTPQQALREPIEFQGNILRKVRCFYSKADDCVRIEHSSRRGHHYKMLLNDGFAYMEVPCKEGILYGVPNLVRPSEAVGIKRAPESGDFIRFYKGDTVKNIKTGRVYTIKQILGDGGGKLILTPVTETKPADLLSAKWGRLKVGGRNIHLLRLCAE

SEQ ID NO: 357 - protein, 1052 aa, Aminomonas paucivorans
MIGEHVRGGCLFDDHWTPNWGAFRLPNTVRTFTKAENPKDGSSLAEPRRQARGLRRRLRRKTQRLEDLRRLLAKEGVLSLSDLETLFRETPAKDPYQLRAEGLDRPLSFPEWVRVLYHITKHRGFQSNRRNPVEDGQERSRQEEEGKLLSGVGENERLLREGGYRTAGEMLARDPKFQDHRRNRAGDYSHTLSRSLLLEEARRLFQSQRTLGNPHASSNLEEAFLHLVAFQNPFASGEDIRNKAGHCSLEPDQIRAPRRSASAETFMLLQKTGNLRLIHRRTGEERPLTDKEREQIHLLAWKQEKVTHKTLRRHLEIPEEWLFTGLPYHRSGDKAEEKLFVHLAGIHEIRKALDKGPDPAVWDTLRSRRDLLDSIADTLTFYKNEDEILPRLESLGLSPENARALAPLSFSGTAHLSLSALGKLLPHLEEGKSYTQARADAGYAAPPPDRHPKLPPLEEADWRNPVVFRALTQTRKVVNALVRRYGPPWCIHLETARELSQPAKVRRRIETEQQANEKKKQQAEREFLDIVGTAPGPGDLLKMRLWREQGGFCPYCEEYLNPTRLAEPGYAEMDHILPYSRSLDNGWHNRVLVHGKDNRDKGNRTPFEAFGGDTARWDRLVAWVQASHLSAPKKRNLLREDFGEEAERELKDRNLTDTRFITKTAATLLRDRLTFHPEAPKDPVMTLNGRLTAFLRKQWGLHKNRKNGDLHHALDAAVLAVASRSFVYRLSSHNAAWGELPRGREAENGFSLPYPAFRSEVLARLCPTREEILLRLDQGGVGYDEAFRNGLRPVFVSRAPSRRLRGKAHMETLRSPKWKDHPEGPRTASRIPLKDLNLEKLERMVGKDRDRKLYEALRERLAAFGGNGKKAFVAPFRKPCRSGEGPLVRSLRIFDSGYSGVELRDGGEVYAVADHESMVRVDVYAKKNRFYLVPVYVADVARGIVKNRAIVAHKSEEEWDLVDGSFDFRFSLFPGDLVEIEKKDGAYLGYYKSCHRGDGRLLLDRHDRMPRESDCGTFYVSTRKDVLSMSKYQVDPLGEIRLVGSEKPPFVL

SEQ ID NO: 358 - protein, 1233 aa, Mycoplasma canis
MEKKRKVTLGFDLGIASVGWAIVDSETNQVYKLGSRLFDAPDTNLERRTQRGTRRLLRRRKYRNQKFYNLVKRTEVFGLSSREAIENRFRELSIKYPNIIELKTKALSQEVCPDEIAWILHDYLKNRGYFYDEKETKEDFDQQTVESMPSYKLNEFYKKYGYFKGALSQPTESEMKDNKDLKEAFFFDFSNKEWLKEINYFFNVQKNILSETFIEEFKKIFSFTRDISKGPGSDNMPSPYGIFGEFGDNGQGGRYEHIWDKNIGKCSIFTNEQRAPKYLPSALIFNFLNELANIRLYSTDKKNIQPLWKLSSVDKLNILLNLFNLPISEKKKKLTSTNINDIVKKESIKSIMISVEDIDMIKDEWAGKEPNVYGVGLSGLNIEESAKENKFKFQDLKILNVLINLLDNVGIKFEFKDRNDIIKNLELLDNLYLFLIYQKESNNKDSSIDLFIAKNESLNIENLKLKLKEFLLGAGNEFENHNSKTHSLSKKAIDEILPKLLDNNEGWNLEAIKNYDEEIKSQIEDNSSLMAKQDKKYLNDNFLKDAILPPNVKVTFQQAILIFNKIIQKFSKDFEIDKVVIELAREMTQDQENDALKGIAKAQKSKKSLVEERLEANNIDKSVFNDKYEKLIYKIFLWISQDFKDPYTGAQISVNEIVNNKVEIDHIIPYSLCFDDSSANKVLVHKQSNQEKSNSLPYEYIKQGHSGWNWDEFTKYVKRVFVNNVDSILSKKERLKKSENLLTASYDGYDKLGFLARNLNDTRYATILFRDQLNNYAEHHLIDNKKMFKVIAMNGAVTSFIRKNMSYDNKLRLKDRSDFSHHAYDAAIIALFSNKTKTLYNLIDPSLNGIISKRSEGYWVIEDRYTGEIKELKKEDWTSIKNNVQARKIAKEIEEYLIDLDDEVFFSRKTKRKTNRQLYNETIYGIATKTDEDGITNYYKKEKFSILDDKDIYLRLLREREKFVINQSNPEVIDQIIEIIESYGKENNIPSRDEAINIKYTKNKINYNLYLKQYMRSLTKSLDQFSEEFINQMIANKTFVLYNPTKNTTRKIKFLRLVNDVKINDIRKNQVINKFNGKNNEPKAFYENINSLGAIVFKNSANNFKTLSINTQIAIFGDKNWDIEDFKTYNMEKIEKYKEIYGIDKTYNFHSFIFPGTILLDKQNKEFYYISSIQTVRDIIEIKFLNKIEFKDENKNQDTSKTPKRLMFGIKSIMNNYEQVDISPFGINKKIFE

SEQ ID NO: 359 - protein, 1119 aa, Lactobacillus coryniformis
MGYRIGLDVGITSTGYAVLKTDKNGLPYKILTLDSVIYPRAENPQTGASLAEPRRIKRGLRRRTRRTKFRKQRTQQLFIHSGLLSKPEIEQILATPQAKYSVYELRVAGLDRRLTNSELFRVLYFFIGHRGFKSNRKAELNPENEADKKQMGQLLNSIEEIRKAIAEKGYRTVGELYLKDPKYNDHKRNKGYIDGYLSTPNRQMLVDEIKQILDKQRELGNEKLTDEFYATYLLGDENRAGIFQAQRDFDEGPGAGPYAGDQIKKMVGKDIFEPTEDRAAKATYTFQYFNLLQKMTSLNYQNTTGDTWHTLNGLDRQAIIDAVFAKAEKPTKTYKPTDFGELRKLLKLPDDARFNLVNYGSLQTQKEIETVEKKTRFVDFKAYHDLVKVLPEEMWQSRQLLDHIGTALTLYSSDKRRRRYFAEELNLPAELIEKLLPLNFSKFGHLSIKSMQNIIPYLEMGQVYSEATTNTGYDFRKKQISKDTIREEITNPVVRRAVTKTIKIVEQIIRRYGKPDGINIELARELGRNFKERGDIQKRQDKNRQTNDKIAAELTELGIPVNGQNIIRYKLHKEQNGVDPYTGDQIPFERAFSEGYEVDHIIPYSISWDDSYTNKVLTSAKCNREKGNRIPMVYLANNEQRLNALTNIADNIIRNSRKRQKLLKQKLSDEELKDWKQRNINDTRFITRVLYNYFRQAIEFNPELEKKQRVLPLNGEVTSKIRSRWGFLKVREDGDLHHAIDATVIAAITPKFIQQVTKYSQHQEVKNNQALWHDAEIKDAEYAAEAQRMDADLFNKIFNGFPLPWPEFLDELLARISDNPVEMMKSRSWNTYTPIEIAKLKPVFVVRLANHKISGPAHLDTIRSAKLFDEKGIVLSRVSITKLKINKKGQVATGDGIYDPENSNNGDKVVYSAIRQALEAHNGSGELAFPDGYLEYVDHGTKKLVRKVRVAKKVSLPVRLKNKAAADNGSMVRIDVFNTGKKFVFVPIYIKDTVEQVLPNKAIARGKSLWYQITESDQFCFSLYPGDMVHIESKTGIKPKYSNKENNTSVVPIKNFYGYFDGADIATASILVRAHDSSYTARSIGIAGLLKFEKYQVDYFGRYHKVHEKKRQLFVKRDE

SEQ ID NO: 360 - protein, 1195 aa, Elusimicrobium minutum
MQKNINTKQNHIYIKQAQKIKEKLGDKPYRIGLDLGVGSIGFAIVSMEENDGNVLLPKEIIMVGSRIFKASAGAADRKLSRGQRNNHRHTRERMRYLWKVLAEQKLALPVPADLDRKENSSEGETSAKRFLGDVLQKDIYELRVKSLDERLSLQELGYVLYHIAGHRGSSAIRTFENDSEEAQKENTENKKIAGNIKRLMAKKNYRTYGEYLYKEFFENKEKHKREKISNAANNHKFSPTRDLVIKEAEAILKKQAGKDGFHKELTEEYIEKLTKAIGYESEKLIPESGFCPYLKDEKRLPASHKLNEERRLWETLNNARYSDPIVDIVTGEITGYYEKQFTKEQKQKLFDYLLTGSELTPAQTKKLLGLKNTNFEDIILQGRDKKAQKIKGYKLIKLESMPFWARLSEAQQDSFLYDWNSCPDEKLLTEKLSNEYHLTEEEIDNAFNEIVLSSSYAPLGKSAMLIILEKIKNDLSYTEAVEEALKEGKLTKEKQAIKDRLPYYGAVLQESTQKIIAKGFSPQFKDKGYKTPHTNKYELEYGRIANPVVHQTLNELRKLVNEIIDILGKKPCEIGLETARELKKSAEDRSKLSREQNDNESNRNRIYEIYIRPQQQVIITRRENPRNYILKFELLEEQKSQCPFCGGQISPNDIINNQADIEHLFPIAESEDNGRNNLVISHSACNADKAKRSPWAAFASAAKDSKYDYNRILSNVKENIPHKAWRFNQGAFEKFIENKPMAARFKTDNSYISKVAHKYLACLFEKPNIICVKGSLTAQLRMAWGLQGLMIPFAKQLITEKESESFNKDVNSNKKIRLDNRHHALDAIVIAYASRGYGNLLNKMAGKDYKINYSERNWLSKILLPPNNIVWENIDADLESFESSVKTALKNAFISVKHDHSDNGELVKGTMYKIFYSERGYTLTTYKKLSALKLTDPQKKKTPKDFLETALLKFKGRESEMKNEKIKSAIENNKRLFDVIQDNLEKAKKLLEEENEKSKAEGKKEKNINDASIYQKAISLSGDKYVQLSKKEPGKFFAISKPTPTTTGYGYDTGDSLCVDLYYDNKGKLCGEIIRKIDAQQKNPLKYKEQGFTLFERIYGGDILEVDFDIHSDKNSFRNNTGSAPENRVFIKVGTFTEITNNNIQIWFGNIIKSTGGQDDSFTINSMQQYNPRKLILSSCGFIKYRSPILKNKEG

SEQ ID NO: 361 - protein, 1082 aa, Neisseria meningitidis; identical to SEQ ID NO: 25

SEQ ID NO: 362 - protein, 1056 aa, Pasteurella multocida
MQTTNLSYILGLDLGIASVGWAVVEINENEDPIGLIDVGVRIFERAEVPKTGESLALSRRLARSTRRLIRRRAHRLLLAKRFLKREGILSTIDLEKGLPNQAWELRVAGLERRLSAIEWGAVLLHLIKHRGYLSKRKNESQTNNKELGALLSGVAQNHQLLQSDDYRTPAELALKKFAKEEGHIRNQRGAYTHTFNRLDLLAELNLLFAQQHQFGNPHCKEHIQQYMTELLMWQKPALSGEAILKMLGKCTHEKNEFKAAKHTYSAERFVWLTKLNNLRILEDGAERALNEEERQLLINHPYEKSKLTYAQVRKLLGLSEQAIFKHLRYSKENAESATFMELKAWHAIRKALENQGLKDTWQDLAKKPDLLDEIGTAFSLYKTDEDIQQYLTNKVPNSVINALLVSLNFDKFIELSLKSLRKILPLMEQGKRYDQACREIYGHHYGEANQKTSQLLPAIPAQEIRNPVVLRTLSQARKVINAIIRQYGSPARVHIETGRELGKSFKERREIQKQQEDNRTKRESAVQKFKELFSDFSSEPKSKDILKFRLYEQQHGKCLYSGKEINIHRLNEKGYVEIDHALPFSRTWDDSFNNKVLVLASENQNKGNQTPYEWLQGKINSERWKNFVALVLGSQCSAAKKQRLLTQVIDDNKFIDRNLNDTRYIARFLSNYIQENLLLVGKNKKNVFTPNGQITALLRSRWGLIKARENNNRHHALDAIVVACATPSMQQKITRFIRFKEVHPYKIENRYEMVDQESGEIISPHFPEPWAYFRQEVNIRVFDNHPDTVLKEMLPDRPQANHQFVQPLFVSRAPTRKMSGQGHMETIKSAKRLAEGISVLRIPLTQLKPNLLENMVNKEREPALYAGLKARLAEFNQDPAKAFATPFYKQGGQQVKAIRVEQVQKSGVLVRENNGVADNASIVRTDVFIKNNKFFLVPIYTWQVAKGILPNKAIVAHKNEDEWEEMDEGAKFKFSLFPNDLVELKTKKEYFFGYYIGLDRATGNISLKEHDGEISKGKDGVYRVGVKLALSFEKYQVDELGKNRQICRPQQRQPVR

SEQ ID NO: 363 - protein, 1059 aa, Rhodovulum sp.
MGIRFAFDLGTNSIGWAVWRTGPGVFGEDTAASLDGSGVLIFKDGRNPKDGQSLATMRRVPRQSRKRRDRFVLRRRDLLAALRKAGLFPVDVEEGRRLAATDPYHLRAKALDESLTPHEMGRVIFHLNQRRGFRSNRKADRQDREKGKIAEGSKRLAETLAATNCRTLGEFLWSRHRGTPRTRSPTRIRMEGEGAKALYAFYPTREMVRAEFERLWTAQSRFAPDLLTPERHEEIAGILFRQRDLAPPKIGCCTFEPSERRLPRALPSVEARGIYERLAHLRITTGPVSDRGLTRPERDVLASALLAGKSLTFKAVRKTLKILPHALVNFEEAGEKGLDGALTAKLLSKPDHYGAAWHGLSFAEKDTFVGKLLDEADEERLIRRLVTENRLSEDAARRCASIPLADGYGRLGRTANTEILAALVEETDETGTVVTYAEAVRRAGERTGRNWHHSDERDGVILDRLPYYGEILQRHVVPGSGEPEEKNEAARWGRLANPTVHIGLNQLRKVVNRLIAAHGRPDQIVVELARELKLNREQKERLDRENRKNREENERRTAILAEHGQRDTAENKIRLRLFEEQARANAGIALCPYTGRAIGIAELFTSEVEIDHILPVSLTLDDSLANRVLCRREANREKRRQTPFQAFGATPAWNDIVARAAKLPPNKRWRFDPAALERFEREGGFLGRQLNETKYLSRLAKIYLGKICDPDRVYVTPGTLTGLLRARWGLNSILSDSNFKNRSDHRHHAVDAVVIGVLTRGMIQRIAHDAARAEDQDLDRVFRDVPVPFEDFRDHVRERVSTITVAVKPEHGKGGALHEDTSYGLVPDTDPNAALGNLVVRKPIRSLTAGEVDRVRDRALRARLGALAAPFRDESGRVRDAKGLAQALEAFGAENGIRRVRILKPDASVVTIADRRTGVPYRAVAPGENHHVDIVQMRDGSWRGFAASVFEVNRPGWRPEWEVKKLGGKLVMRLHKGDMVELSDKDGQRRVKVVQQIEISANRVRLSPHNDGGKLQDRHADADDPFRWDLATIPLLKDRGCVAVRVDPIGVVTLRRSNV

SEQ ID NO: 364 - protein, 1096 aa, Eubacterium dolichum
MMEVFMGRLVLGLDIGITSVGFGIIDLDESEIVDYGVRLFKEGTAAENETRRTKRGGRRLKRRRVTRREDMLHLLKQAGIISTSFHPLNNPYDVRVKGLNERLNGEELATALLHLCKHRGSSVETIEDDEAKAKEAGETKKVLSMNDQLLKSGKYVCEIQKERLRTNGHIRGHENNFKTRAYVDEAFQILSHQDLSNELKSAIITIISRKRMYYDGPGGPLSPTPYGRYTYFGQKEPIDLIEKMRGKCSLFPNEPRAPKLAYSAELFNLLNDLNNLSIEGEKLTSEQKAMILKIVHEKGKITPKQLAKEVGVSLEQIRGFRIDTKGSPLLSELTGYKMIREVLEKSNDEHLEDHVFYDEIAEILTKTKDIEGRKKQISELSSDLNEESVHQLAGLTKFTAYHSLSFKALRLINEEMLKTELNQMQSITLFGLKQNNELSVKGMKNIQADDTAILSPVAKRAQRETFKVVNRLREIYGEFDSIVVEMAREKNSEEQRKAIRERQKFFEMRNKQVADIIGDDRKINAKLREKLVLYQEQDGKTAYSLEPIDLKLLIDDPNAYEVDHIIPISISLDDSITNKVLVTHRENQEKGNLTPISAFVKGRFTKGSLAQYKAYCLKLKEKNIKTNKGYRKKVEQYLLNENDIYKYDIQKEFINRNLVDTSYASRVVLNTLTTYFKQNEIPTKVFTVKGSLTNAFRRKINLKKDRDEDYGHHAIDALIIASMPKMRLLSTIFSRYKIEDIYDESTGEVFSSGDDSMYYDDRYFAFIASLKAIKVRKFSHKIDTKPNRSVADETIYSTRVIDGKEKVVKKYKDIYDPKFTALAEDILNNAYQEKYLMALHDPQTFDQIVKVVNYYFEEMSKSEKYFTKDKKGRIKISGMNPLSLYRDEHGMLKKYSKKGDGPAITQMKYFDGVLGNHIDISAHYQVRDKKVVLQQISPYRTDFYYSKENGYKFVTIRYKDVRWSEKKKKYVIDQQDYAMKKAEKKIDDTYEFQFSMHRDELIGITKAEGEALIYPDETWHNFNFFFHAGETPEILKFTATNNDKSNKIEVKPIHCYCKMRLMPTISKKIVRIDKYATDVVGNLYKVKKNTLKFEFD

SEQ ID NO: 365 - protein, 1132 aa, Nitratifractor salsuginis
MKKILGVDLGITSFGYAILQETGKDLYRCLDNSVVMRNNPYDEKSGESSQSIRSTQKSMRRLIEKRKKRIRCVAQTMERYGILDYSETMKINDPKNNPIKNRWQLRAVDAWKRPLSPQELFAIFAHMAKHRGYKSIATEDLIYELELELGLNDPEKESEKKADERRQVYNALRHLEELRKKYGGETIAQTIHRAVEAGDLRSYRNHDDYEKMIRREDIEEEIEKVLLRQAELGALGLPEEQVSELIDELKACITDQEMPTIDESLFGKCTFYKDELAAPAYSYLYDLYRLYKKLADLNIDGYEVTQEDREKVIEWVEKKIAQGKNLKKITHKDLRKILGLAPEQKIFGVEDERIVKGKKEPRTFVPFFFLADIAKFKELFASIQKHPDALQIFRELAEILQRSKTPQEALDRLRALMAGKGIDTDDRELLELFKNKRSGTRELSHRYILEALPLFLEGYDEKEVQRILGFDDREDYSRYPKSLRHLHLREGNLFEKEENPINNHAVKSLASWALGLIADLSWRYGPFDEIILETTRDALPEKIRKEIDKAMREREKALDKIIGKYKKEFPSIDKRLARKIQLWERQKGLDLYSGKVINLSQLLDGSADIEHIVPQSLGGLSTDYNTIVTLKSVNAAKGNRLPGDWLAGNPDYRERIGMLSEKGLIDWKKRKNLLAQSLDEIYTENTHSKGIRATSYLEALVAQVLKRYYPFPDPELRKNGIGVRMIPGKVTSKTRSLLGIKSKSRETNFHHAEDALILSTLTRGWQNRLHRMLRDNYGKSEAELKELWKKYMPHIEGLTLADYIDEAFRRFMSKGEESLFYRDMFDTIRSISYWVDKKPLSASSHKETVYSSRHEVPTLRKNILEAFDSLNVIKDRHKLTTEEFMKRYDKEIRQKLWLHRIGNTNDESYRAVEERATQIAQILTRYQLMDAQNDKEIDEKFQQALKELITSPIEVTGKLLRKMRFVYDKLNAMQIDRGLVETDKNMLGIHISKGPNEKLIFRRMDVNNAHELQKERSGILCYLNEMLFIFNKKGLIHYGCLRSYLEKGQGSKYIALFNPRFPANPKAQPSKFTSDSKIKQVGIGSATGIIKAHLDLDGHVRSYEVFGTLPEGSIEWFKEESGYGRVEDDPHH

SEQ ID NO: 366 - protein, 1173 aa, Rhodospirillum rubrum
MRPIEPWILGLDIGTDSLGWAVFSCEEKGPPTAKELLGGGVRLFDSGRDAKDHTSRQAERGAFRRARRQTRTWPWRRDRLIALFQAAGLTPPAAETRQIALALRREAVSRPLAPDALWAALLHLAHHRGFRSNRIDKRERAAAKALAKAKPAKATAKATAPAKEADDEAGFWEGAEAALRQRMAASGAPTVGALLADDLDRGQPVRMRYNQSDRDGVVAPTRALIAEELAEIVARQSSAYPGLDWPAVTRLVLDQRPLRSKGAGPCAFLPGEDRALRALPTVQDFIIRQTLANLRLPSTSADEPRPLTDEEHAKALALLSTARFVEWPALRRALGLKRGVKFTAETERNGAKQAARGTAGNLTEAILAPLIPGWSGWDLDRKDRVFSDLWAARQDRSALLALIGDPRGPTRVTEDETAEAVADAIQIVLPTGRASLSAKAARAIAQAMAPGIGYDEAVTLALGLHHSHRPRQERLARLPYYAAALPDVGLDGDPVGPPPAEDDGAAAEAYYGRIGNISVHIALNETRKIVNALLHRHGPILRLVMVETTRELKAGADERKRMIAEQAERERENAEIDVELRKSDRWMANARERRQRVRLARRQNNLCPYTSTPIGHADLLGDAYDIDHVIPLARGGRDSLDNMVLCQSDANKTKGDKTPWEAFHDKPGWIAQRDDFLARLDPQTAKALAWRFADDAGERVARKSAEDEDQGFLPRQLTDTGYIARVALRYLSLVTNEPNAVVATNGRLTGLLRLAWDITPGPAPRDLLPTPRDALRDDTAARRFLDGLTPPPLAKAVEGAVQARLAALGRSRVADAGLADALGLTLASLGGGGKNRADHRHHFIDAAMIAVTTRGLINQINQASGAGRILDLRKWPRTNFEPPYPTFRAEVMKQWDHIHPSIRPAHRDGGSLHAATVFGVRNRPDARVLVQRKPVEKLFLDANAKPLPADKIAEIIDGFASPRMAKRFKALLARYQAAHPEVPPALAALAVARDPAFGPRGMTANTVIAGRSDGDGEDAGLITPFRANPKAAVRTMGNAVYEVWEIQVKGRPRWTHRVLTRFDRTQPAPPPPPENARLVMRLRRGDLVYWPLESGDRLFLVKKMAVDGRLALWPARLATGKATALYAQLSCPNINLNGDQGYCVQSAEGIRKEKIRTTSCTALGRLRLSKKAT

SEQ ID NO: 367 - protein, 1021 aa, Clostridium cellulolyticum
MKYTLGLDVGIASVGWAVIDKDNNKIIDLGVRCFDKAEESKTGESLATARRIARGMRRRISRRSQRLRLVKKLFVQYEIIKDSSEFNRIFDTSRDGWKDPWELRYNALSRILKPYELVQVLTHITKRRGFKSNRKEDLSTTKEGVVITSIKNNSEMLRTKNYRTIGEMIFMETPENSNKRNKVDEYIHTIAREDLLNEIKYIFSIQRKLGSPFVTEKLEHDFLNIWEFQRPFASGDSILSKVGKCTLLKEELRAPTSCYTSEYFGLLQSINNLVLVEDNNTLTLNNDQRAKIIEYAHFKNEIKYSEIRKLLDIEPEILFKAHNLTHKNPSGNNESKKFYEMKSYHKLKSTLPTDIWGKLHSNKESLDNLFYCLTVYKNDNEIKDYLQANNLDYLIEYIAKLPTFNKFKHLSLVAMKRIIPFMEKGYKYSDACNMAELDFTGSSKLEKCNKLTVEPIIENVTNPVVIRALTQARKVINAIIQKYGLPYMVNIELAREAGMTRQDRDNLKKEHENNRKAREKISDLIRQNGRVASGLDILKWRLWEDQGGRCAYSGKPIPVCDLLNDSLTQIDHIYPYSRSMDDSYMNKVLVLTDENQNKRSYTPYEVWGSTEKWEDFEARIYSMHLPQSKEKRLLNRNFITKDLDSFISRNLNDTRYISRFLKNYIESYLQFSNDSPKSCVVCVNGQCTAQLRSRWGLNKNREESDLHHALDAAVIACADRKIIKEITNYYNERENHNYKVKYPLPWHSFRQDLMETLAGVFISRAPRRKITGPAHDETIRSPKHFNKGLTSVKIPLTTVTLEKLETMVKNTKGGISDKAVYNVLKNRLIEHNNKPLKAFAEKIYKPLKNGTNGAIIRSIRVETPSYTGVFRNEGKGISDNSLMVRVDVFKKKDKYYLVPIYVAHMIKKELPSKAIVPLKPESQWELIDSTHEFLFSLYQNDYLVIKTKKGITEGYYRSCHRGTGSLSLMPHFANNKNVKIDIGVRTAISIEKYNVDILGNKSIVKGEPRRGMEKYNSFKSN

SEQ ID NO: 368 - protein, 1024 aa, Helicobacter mustelae
MIRTLGIDIGIASIGWAVIEGEYTDKGLENKEIVASGVRVFTKAENPKNKESLALPRTLARSARRRNARKKGRIQQVKHYLSKALGLDLECFVQGEKLATLFQTSKDFLSPWELRERALYRVLDKEELARVILHIAKRRGYDDITYGVEDNDSGKIKKAIAENSKRIKEEQCKTIGEMMYKLYFQKSLNVRNKKESYNRCVGRSELREELKTIFQIQQELKSPWVNEELIYKLLGNPDAQSKQEREGLIFYQRPLKGFGDKIGKCSHIKKGENSPYRACKHAPSAEEFVALTKSINFLKNLTNRHGLCFSQEDMCVYLGKILQEAQKNEKGLTYSKLKLLLDLPSDFEFLGLDYSGKNPEKAVFLSLPSTFKLNKITQDRKTQDKIANILGANKDWEAILKELESLQLSKEQIQTIKDAKLNFSKHINLSLEALYHLLPLMREGKRYDEGVEILQERGIFSKPQPKNRQLLPPLSELAKEESYFDIPNPVLRRALSEFRKVVNALLEKYGGFHYFHIELTRDVCKAKSARMQLEKINKKNKSENDAASQLLEVLGLPNTYNNRLKCKLWKQQEEYCLYSGEKITIDHLKDQRALQIDHAFPLSRSLDDSQSNKVLCLTSSNQEKSNKTPYEWLGSDEKKWDMYVGRVYSSNFSPSKKRKLTQKNFKERNEEDFLARNLVDTGYIGRVTKEYIKHSLSFLPLPDGKKEHIRIISGSMTSTMRSFWGVQEKNRDHHLHHAQDAIIIACIEPSMIQKYTTYLKDKETHRLKSHQKAQILREGDHKLSLRWPMSNFKDKIQESIQNIIPSHHVSHKVTGELHQETVRTKEFYYQAFGGEEGVKKALKFGKIREINQGIVDNGAMVRVDIFKSKDKGKFYAVPIYTYDFAIGKLPNKAIVQGKKNGIIKDWLEMDENYEFCFSLFKNDCIKIQTKEMQEAVLAIYKSTNSAKATIELEHLSKYALKNEDEEKMFTDTDKEKNKTMTRESCGIQGLKVFQKVKLSVLGEVLEHKPRNRQNIALKTTPKHV

SEQ ID NO: 369 - protein, 1092 aa, Ilyobacter polytropus
MKYSIGLDIGIASVGWSVINKDKERIEDMGVRIFQKAENPKDGSSLASSRREKRGSRRRNRRKKHRLDRIKNILCESGLVKKNEIEKIYKNAYLKSPWELRAKSLEAKISNKEIAQILLHIAKRRGFKSFRKTDRNADDTGKLLSGIQENKKIMEEKGYLTIGDMVAKDPKFNTHVRNKAGSYLFSFSRKLLEDEVRKIQAKQKELGNTHFTDDVLEKYIEVFNSQRNFDEGPSKPSPYYSEIGQIAKMIGNCTFESSEKRTAKNTWSGERFVFLQKLNNFRIVGLSGKRPLTEEERDIVEKEVYLKKEVRYEKLRKILYLKEEERFGDLNYSKDEKQDKKTEKTKFISLIGNYTIKKLNLSEKLKSEIEEDKSKLDKIIEILTFNKSDKTIESNLKKLELSREDIEILLSEEFSGTLNLSLKAIKKILPYLEKGLSYNEACEKADYDYKNNGIKFKRGELLPVVDKDLIANPVVLRAISQTRKVVNAIIRKYGTPHTIHVEVARDLAKSYDDRQTIIKENKKRELENEKTKKFISEEFGIKNVKGKLLLKYRLYQEQEGRCAYSRKELSLSEVILDESMTDIDHIIPYSRSMDDSYSNKVLVLSGENRKKSNLLPKEYFDRQGRDWDTFVLNVKAMKIHPRKKSNLLKEKFTREDNKDWKSRALNDTRYISRFVANYLENALEYRDDSPKKRVFMIPGQLTAQLRARWRLNKVRENGDLHHALDAAVVAVTDQKAINNISNISRYKELKNCKDVIPSIEYHADEETGEVYFEEVKDTRFPMPWSGFDLELQKRLESENPREEFYNLLSDKRYLGWFNYEEGFIEKLRPVFVSRMPNRGVKGQAHQETIRSSKKISNQIAVSKKPLNSIKLKDLEKMQGRDTDRKLYEALKNRLEEYDDKPEKAFAEPFYKPTNSGKRGPLVRGIKVEEKQNVGVYVNGGQASNGSMVRIDVFRKNGKFYTVPIYVHQTLLKELPNRAINGKPYKDWDLIDGSFEFLYSFYPNDLIEIEFGKSKSIKNDNKLTKTEIPEVNLSEVLGYYRGMDTSTGAATIDTQDGKIQMRIGIKTVKNIKKYQVDVLGNVYKVKREKRQTF

SEQ ID NO: 370 - protein, 1179 aa, Sphaerochaeta globus
MSKKVSRRYEEQAQEICQRLGSRPYSIGLDLGVGSIGVAVAAYDPIKKQPSDLVFVSSRIFIPSTGAAERRQKRGQRNSLRHRANRLKFLWKLLAERNLMLSYSEQDVPDPARLRFEDAVVRANPYELRLKGLNEQLTLSELGYALYHIANHRGSSSVRTFLDEEKSSDDKKLEEQQAMTEQLAKEKGISTFIEVLTAFNTNGLIGYRNSESVKSKGVPVPTRDIISNEIDVLLQTQKQFYQEILSDEYCDRIVSAILFENEKIVPEAGCCPYFPDEKKLPRCHFLNEERRLWEAINNARIKMPMQEGAAKRYQSASFSDEQRHILFHIARSGTDITPKLVQKEFPALKTSIIVLQGKEKAIQKIAGFRFRRLEEKSFWKRLSEEQKDDFFSAWTNTPDDKRLSKYLMKHLLLTENEVVDALKTVSLIGDYGPIGKTATQLLMKHLEDGLTYTEALERGMETGEFQELSVWEQQSLLPYYGQILTGSTQALMGKYWHSAFKEKRDSEGFFKPNTNSDEEKYGRIANPVVHQTLNELRKLMNELITILGAKPQEITVELARELKVGAEKREDIIKQQTKQEKEAVLAYSKYCEPNNLDKRYIERFRLLEDQAFVCPYCLEHISVADIAAGRADVDHIFPRDDTADNSYGNKVVAHRQCNDIKGKRTPYAAFSNTSAWGPIMHYLDETPGMWRKRRKFETNEEEYAKYLQSKGFVSRFESDNSYIAKAAKEYLRCLFNPNNVTAVGSLKGMETSILRKAWNLQGIDDLLGSRHWSKDADTSPTMRKNRDDNRHHGLDAIVALYCSRSLVQMINTMSEQGKRAVEIEAMIPIPGYASEPNLSFEAQRELFRKKILEFMDLHAFVSMKTDNDANGALLKDTVYSILGADTQGEDLVFVVKKKIKDIGVKIGDYEEVASAIRGRITDKQPKWYPMEMKDKIEQLQSKNEAALQKYKESLVQAAAVLEESNRKLIESGKKPIQLSEKTISKKALELVGGYYYLISNNKRTKTFVVKEPSNEVKGFAFDTGSNLCLDFYHDAQGKLCGEIIRKIQAMNPSYKPAYMKQGYSLYVRLYQGDVCELRASDLTEAESNLAKTTHVRLPNAKPGRTFVIIITFTEMGSGYQIYFSNLAKSKKGQDTSFTLTTIKNYDVRKVQLSSAGLVRYVSPLLVDKIEKDEVALCGE

SEQ ID NO: 371 - protein, 1054 aa, Staphylococcus lugdunensis
MNQKFILGLDIGITSVGYGLIDYETKNIIDAGVRLFPEANVENNEGRRSKRGSRRLKRRRIHRLERVKKLLEDYNLLDQSQIPQSTNPYAIRVKGLSEALSKDELVIALLHIAKRRGIHKIDVIDSNDDVGNELSTKEQLNKNSKLLKDKFVCQIQLERMNEGQVRGEKNRFKTADIIKEIIQLLNVQKNFHQLDENFINKYIELVEMRREYFEGPGKGSPYGWEGDPKAWYETLMGHCTYFPDELRSVKYAYSADLFNALNDLNNLVIQRDGLSKLEYHEKYHIIENVFKQKKKPTLKQIANEINVNPEDIKGYRITKSGKPQFTEFKLYHDLKSVLFDQSILENEDVLDQIAEILTIYQDKDSIKSKLTELDILLNEEDKENIAQLTGYTGTHRLSLKCIRLVLEEQWYSSRNQMEIFTHLNIKPKKINLTAANKIPKAMIDEFILSPVVKRTFGQAINLINKIIEKYGVPEDIIIELARENNSKDKQKFINEMQKKNENTRKRINEIIGKYGNQNAKRLVEKIRLHDEQEGKCLYSLESIPLEDLLNNPNHYEVDHIIPRSVSFDNSYHNKVLVKQSENSKKSNLTPYQYFNSGKSKLSYNQFKQHILNLSKSQDRISKKKKEYLLEERDINKFEVQKEFINRNLVDTRYATRELTNYLKAYFSANNMNVKVKTINGSFTDYLRKVWKFKKERNHGYKHHAEDALIIANADFLFKENKKLKAVNSVLEKPEIESKQLDIQVDSEDNYSEMFIIPKQVQDIKDFRNFKYSHRVDKKPNRQLINDTLYSTRKKDNSTYIVQTIKDIYAKDNTTLKKQFDKSPEKFLMYQHDPRTFEKLEVIMKQYANEKNPLAKYHEETGEYLTKYSKKNNGPIVKSLKYIGNKLGSHLDVTHQFKSSTKKLVKLSIKPYRFDVYLTDKGYKFITISYLDVLKKDNYYYIPEQKYDKLKLGKAIDKNAKFIASFYKNDLIKLDGEIYKIIGVNSDTRNMIELDLPDIRYKEYCELNNIKGEPRIKKTIGKKVNSIEKLTTDVLGNVFTNTQYTKPQLLFKRGN

SEQ ID NO: 372 - protein, 1061 aa, Treponema sp.
MIMKLEKWRLGLDLGTNSIGWSVFSLDKDNSVQDLIDMGVRIFSDGRDPKTKEPLAVARRTARSQRKLIYRRKLRRKQVFKFLQEQGLFPKTKEECMTLKSLNPYELRIKALDEKLEPYELGRALFNLAVRRGFKSNRKDGSREEVSEKKSPDEIKTQADMQTHLEKAIKENGCRTITEFLYKNQGENGGIRFAPGRMTYYPTRKMYEEEFNLIRSKQEKYYPQVDWDDIYKAIFYQRPLKPQQRGYCIYENDKERTFKAMPCSQKLRILQDIGNLAYYEGGSKKRVELNDNQDKVLYELLNSKDKVTFDQMRKALCLADSNSFNLEENRDFLIGNPTAVKMRSKNRFGKLWDEIPLEEQDLIIETIITADEDDAVYEVIKKYDLTQEQRDFIVKNTILQSGTSMLCKEVSEKLVKRLEEIADLKYHEAVESLGYKFADQTVEKYDLLPYYGKVLPGSTMEIDLSAPETNPEKHYGKISNPTVHVALNQTRVVVNALIKEYGKPSQIAIELSRDLKNNVEKKAEIARKQNQRAKENIAINDTISALYHTAFPGKSFYPNRNDRMKYRLWSELGLGNKCIYCGKGISGAELFTKEIEIEHILPFSRTLLDAESNLTVAHSSCNAFKAERSPFEAFGTNPSGYSWQEIIQRANQLKNTSKKNKFSPNAMDSFEKDSSFIARQLSDNQYIAKAALRYLKCLVENPSDVWTTNGSMTKLLRDKWEMDSILCRKFTEKEVALLGLKPEQIGNYKKNRFDHRHHAIDAVVIGLTDRSMVQKLATKNSHKGNRIEIPEFPILRSDLIEKVKNIVVSFKPDHGAEGKLSKETLLGKIKLHGKETFVCRENIVSLSEKNLDDIVDEIKSKVKDYVAKHKGQKIEAVLSDFSKENGIKKVRCVNRVQTPIEITSGKISRYLSPEDYFAAVIWEIPGEKKTFKAQYIRRNEVEKNSKGLNVVKPAVLENGKPHPAAKQVCLLHKDDYLEFSDKGKMYFCRIAGYAATNNKLDIRPVYAVSYCADWINSTNETMLTGYWKPTPTQNWVSVNVLFDKQKARLVTVSPIGRVFRK

SEQ ID NO: 373 - protein, 1011 aa, Unknown
  Uncultured delta polypeptide
MSSKAIDSLEQLDLFKPQEYTLGLDLGIKSIGWAILSGERIANAGVYLFETAEELNSTGNKLISKAAERGRKRRIRRMLDRKARRGRHIRYLLEREGLPTDELEEVVVHQSNRTLWDVRAEAVERKLTKQELAAVLFHLVRHRGYFPNTKKLPPDDESDSADEEQGKINRATSRLREELKASDCKTIGQFLAQNRDRQRNREGDYSNLMARKLVFEEALQILAFQRKQGHELSKDFEKTYLDVLMGQRSGRSPKLGNCSLIPSELRAPSSAPSTEWFKFLQNLGNLQISNAYREEWSIDAPRRAQIIDACSQRSTSSYWQIRRDFQIPDEYRFNLVNYERRDPDVDLQEYLQQQERKTLANFRNWKQLEKIIGTGHPIQTLDEAARLITLIKDDEKLSDQLADLLPEASDKAITQLCELDFTTAAKISLEAMYRILPHMNQGMGFFDACQQESLPEIGVPPAGDRVPPFDEMYNPVVNRVLSQSRKLINAVIDEYGMPAKIRVELARDLGKGRELRERIKLDQLDKSKQNDQRAEDFRAEFQQAPRGDQSLRYRLWKEQNCTCPYSGRMIPVNSVLSEDTQIDHILPISQSFDNSLSNKVLCFTEENAQKSNRTPFEYLDAADFQRLEAISGNWPEAKRNKLLHKSFGKVAEEWKSRALNDTRYLTSALADHLRHHLPDSKIQTVNGRITGYLRKQWGLEKDRDKHTHHAVDAIVVACTTPAIVQQVTLYHQDIRRYKKLGEKRPTPWPETFRQDVLDVEEEIFITRQPKKVSGGIQTKDTLRKHRSKPDRQRVALTKVKLADLERLVEKDASNRNLYEHLKQCLEESGDQPTKAFKAPFYMPSGPEAKQRPILSKVTLLREKPEPPKQLTELSGGRRYDSMAQGRLDIYRYKPGGKRKDEYRVVLQRMIDLMRGEENVHVFQKGVPYDQGPEIEQNYTFLFSLYFDDLVEFQRSADSEVIRGYYRTFNIANGQLKISTYLEGRQDFDFFGANRLAHFAKVQVNLLGKVIK

SEQ ID NO: 374 - protein, 1029 aa, Alicycliphilus denitrificans
MRSLRYRLALDLGSTSLGWALFRLDACNRPTAVIKAGVRIFSDGRNPKDGSSLAVTRRAARAMRRRRDRLLKRKTRMQAKLVEHGFFPADAGKRKALEQLNPYALRAKGLQEALLPGEFARALFHINQRRGFKSNRKTDKKDNDSGVLKKAIGQLRQQMAEQGSRTVGEYLWTRLQQGQGVRARYREKPYTTEEGKKRIDKSYDLYIDRAMIEQEFDALWAAQAAFNPTLFHEAARADLKDTLLHQRPLRPVKPGRCTLLPEEERAPLALPSTQRFRIHQEVNHLRLLDENLREVALTLAQRDAVVTALETKAKLSFEQIRKLLKLSGSVQFNLEDAKRTELKGNATSAALARKELFGAAWSGFDEALQDEIVWQLVTEEGEGALIAWLQTHTGVDEARAQAIVDVSLPEGYGNLSRKALARIVPALRAAVITYDKAVQAAGFDHHSQLGFEYDASEVEDLVHPETGEIRSVFKQLPYYGKALQRHVAFGSGKPEDPDEKRYGKIANPTVHIGLNQVRMVVNALIRRYGRPTEVVIELARDLKQSREQKVEAQRRQADNQRRNARIRRSIAEVLGIGEERVRGSDIQKWICWEELSFDAADRRCPYSGVQISAAMLLSDEVEVEHILPFSKTLDDSLNNRTVAMRQANRIKRNRTPWDARAEFEAQGWSYEDILQRAERMPLRKRYRFAPDGYERWLGDDKDFLARALNDTRYLSRVAAEYLRLVCPGTRVIPGQLTALLRGKFGLNDVLGLDGEKNRNDHRHHAVDACVIGVTDQGLMQRFATASAQARGDGLTRLVDGMPMPWPTYRDHVERAVRHIWVSHRPDHGFEGAMMEETSYGIRKDGSIKQRRKADGSAGREISNLIRIHEATQPLRHGVSADGQPLAYKGYVGGSNYCIEITVNDKGKWEGEVISTFRAYGVVRAGGMGRLRNPHEGQNGRKLIMRLVIGDSVRLEVDGAERTMRIVKISGSNGQIFMAPIHEANVDARNTDKQDAFTYTSKYAGSLQKAKTRRVTISPIGEVRDPGFKG

SEQ ID NO: 375 - protein, 1168 aa, Azospirillum sp.
MARPAFRAPRREHVNGWTPDPHRISKPFFILVSWHLLSRVVIDSSSGCFPGTSRDHTDKFAEWECAVQPYRLSFDLGTNSIGWGLLNLDRQGKPREIRALGSRIFSDGRDPQDKASLAVARRLARQMRRRRDRYLTRRTRLMGALVRFGLMPADPAARKRLEVAVDPYLARERATRERLEPFEIGRALFHLNQRRGYKPVRTATKPDEEAGKVKEAVERLEAAIAAAGAPTLGAWFAWRKTRGETLRARLAGKGKEAAYPFYPARRMLEAEFDTLWAEQARHHPDLLTAEAREILRHRIFHQRPLKPPPVGRCTLYPDDGRAPRALPSAQRLRLFQELASLRVIHLDLSERPLTPAERDRIVAFVQGRPPKAGRKPGKVQKSVPFEKLRGLLELPPGTGFSLESDKRPELLGDETGARIAPAFGPGWTALPLEEQDALVELLLTEAEPERAIAALTARWALDEATAAKLAGATLPDFHGRYGRRAVAELLPVLERETRGDPDGRVRPIRLDEAVKLLRGGKDHSDFSREGALLDALPYYGAVLERHVAFGTGNPADPEEKRVGRVANPTVHIALNQLRHLVNAILARHGRPEEIVIELARDLKRSAEDRRREDKRQADNQKRNEERKRLILSLGERPTPRNLLKLRLWEEQGPVENRRCPYSGETISMRMLLSEQVDIDHILPFSVSLDDSAANKVVCLREANRIKRNRSPWEAFGHDSERWAGILARAEALPKNKRWRFAPDALEKLEGEGGLRARHLNDTRHLSRLAVEYLRCVCPKVRVSPGRLTALLRRRWGIDAILAEADGPPPEVPAETLDPSPAEKNRADHRHHALDAVVIGCIDRSMVQRVQLAAASAEREAAAREDNIRRVLEGFKEEPWDGFRAELERRARTIVVSHRPEHGIGGALHKETAYGPVDPPEEGFNLVVRKPIDGLSKDEINSVRDPRLRRALIDRLAIRRRDANDPATALAKAAEDLAAQPASRGIRRVRVLKKESNPIRVEHGGNPSGPRSGGPFHKLLLAGEVHHVDVALRADGRRWVGHWVTLFEAHGGRGADGAAAPPRLGDGERFLMRLHKGDCLKLEHKGRVRVMQVVKLEPSSNSVVVVEPHQVKTDRSKHVKISCDQLRARGARRVTVDPLGRVRVHAPGARVGIGGDAGRTAMEPAEDIS

SEQ ID NO: 376 - protein, 1064 aa, Bradyrhizobium sp.
MKRTSLRAYRLGVDLGANSLGWFVVWLDDHGQPEGLGPGGVRIFPDGRNPQSKQSNAAGRRLARSARRRRDRYLQRRGKLMGLLVKHGLMPADEPARKRLECLDPYGLRAKALDEVLPLHHVGRALFHLNQRRGLFANRAIEQGDKDASAIKAAAGRLQTSMQACGARTLGEFLNRRHQLRATVRARSPVGGDVQARYEFYPTRAMVDAEFEAIWAAQAPHHPTMTAEAHDTIREAIFSQRAMKRPSIGKCSLDPATSQDDVDGFRCAWSHPLAQRFRIWQDVRNLAVVETGPTSSRLGKEDQDKVARALLQTDQLSFDEIRGLLGLPSDARFNLESDRRDHLKGDATGAILSARRHFGPAWHDRSLDRQIDIVALLESALDEAAIIASLGTTHSLDEAAAQRALSALLPDGYCRLGLRAIKRVLPLMEAGRTYAEAASAAGYDHALLPGGKLSPTGYLPYYGQWLQNDVVGSDDERDTNERRWGRLPNPTVHIGIGQLRRVVNELIRWHGPPAEITVELTRDLKLSPRRLAELEREQAENQRKNDKRTSLLRKLGLPASTHNLLKLRLWDEQGDVASECPYTGEAIGLERLVSDDVDIDHLIPFSISWDDSAANKVVCMRYANREKGNRTPFEAFGHRQGRPYDWADIAERAARLPRGKRWRFGPGARAQFEELGDFQARLLNETSWLARVAKQYLAAVTHPHRIHVLPGRLTALLRATWELNDLLPGSDDRAAKSRKDHRHHAIDALVAALTDQALLRRMANAHDDTRRKIEVLLPWPTFRIDLETRLKAMLVSHKPDHGLQARLHEDTAYGTVEHPETEDGANLVYRKTFVDISEKEIDRIRDRRLRDLVRAHVAGERQQGKTLKAAVLSFAQRRDIAGHPNGIRHVRLTKSIKPDYLVPIRDKAGRIYKSYNAGENAFVDILQAESGRWIARATTVFQANQANESHDAPAAQPIMRVFKGDMLRIDHAGAEKFVKIVRLSPSNNLLYLVEHHQAGVFQTRHDDPEDSFRWLFASFDKLREWNAELVRIDTLGQPWRRKRGLETGSEDATRIGWTRPKKWP

SEQ ID NO: 377 - protein, 1037 aa, Parvibaculum lavamentivorans
MERIFGFDIGTTSIGFSVIDYSSTQSAGNIQRLGVRIFPEARDPDGTPLNQQRRQKRMMRRQLRRRRIRRKALNETLHEAGFLPAYGSADWPVVMADEPYELRRRGLEEGLSAYEFGRAIYHLAQHRHFKGRELEESDTPDPDVDDEKEAANERAATLKALKNEQTTLGAWLARRPPSDRKRGIHAHRNVVAEEFERLWEVQSKFHPALKSEEMRARISDTIFAQRPVFWRKNTLGECRFMPGEPLCPKGSWLSQQRRMLEKLNNLAIAGGNARPLDAEERDAILSKLQQQASMSWPGVRSALKALYKQRGEPGAEKSLKFNLELGGESKLLGNALEAKLADMFGPDWPAHPRKQEIRHAVHERLWAADYGETPDKKRVIILSEKDRKAHREAAANSFVADFGITGEQAAQLQALKLPTGWEPYSIPALNLFLAELEKGERFGALVNGPDWEGWRRTNFPHRNQPTGEILDKLPSPASKEERERISQLRNPTVVRTQNELRKVVNNLIGLYGKPDRIRIEVGRDVGKSKREREEIQSGIRRNEKQRKKATEDLIKNGIANPSRDDVEKWILWKEGQERCPYTGDQIGFNALFREGRYEVEHIWPRSRSFDNSPRNKTLCRKDVNIEKGNRMPFEAFGHDEDRWSAIQIRLQGMVSAKGGTGMSPGKVKRFLAKTMPEDFAARQLNDTRYAAKQILAQLKRLWPDMGPEAPVKVEAVTGQVTAQLRKLWTLNNILADDGEKTRADHRHHAIDALTVACTHPGMTNKLSRYWQLRDDPRAEKPALTPPWDTIRADAEKAVSEIVVSHRVRKKVSGPLHKETTYGDTGTDIKTKSGTYRQFVTRKKIESLSKGELDEIRDPRIKEIVAAHVAGRGGDPKKAFPPYPCVSPGGPEIRKVRLTSKQQLNLMAQTGNGYADLGSNHHIAIYRLPDGKADFEIVSLFDASRRLAQRNPIVQRTRADGASFVMSLAAGEAIMIPEGSKKGIWIVQGVWASGQVVLERDTDADHSTTTRPMPNPILKDDAKKVSIDPIGRVRPSND

SEQ ID NO: 378 - protein, 1218 aa, Prevotella timonensis
MNKRILGLDTGTNSLGWAVVDWDEHAQSYELIKYGDVIFQEGVKIEKGIESSKAAERSGYKAIRKQYFRRRLRKIQVLKVLVKYHLCPYLSDDDLRQWHLQKQYPKSDELMLWQRTSDEEGKNPYYDRHRCLHEKLDLTVEADRYTLGRALYHLTQRRGFLSNRLDTSADNKEDGVVKSGISQLSTEMEEAGCEYLGDYFYKLYDAQGNKVRIRQRYTDRNKHYQHEFDAICEKQELSSELIEDLQRAIFFQLPLKSQRHGVGRCTFERGKPRCADSHPDYEEFRMLCFVNNIQVKGPHDLELRPLTYEEREKIEPLFFRKSKPNFDFEDIAKALAGKKNYAWIHDKEERAYKFNYRMTQGVPGCPTIAQLKSIFGDDWKTGIAETYTLIQKKNGSKSLQEMVDDVWNVLYSFSSVEKLKEFAHHKLQLDEESAEKFAKIKLSHSFAALSLKAIRKFLPFLRKGMYYTHASFFANIPTIVGKEIWNKEQNRKYIMENVGELVFNYQPKHREVQGTIEMLIKDFLANNFELPAGATDKLYHPSMIETYPNAQRNEFGILQLGSPRTNAIRNPMAMRSLHILRRVVNQLLKESIIDENTEVHVEYARELNDANKRRAIADRQKEQDKQHKKYGDEIRKLYKEETGKDIEPTQTDVLKFQLWEEQNHHCLYTGEQIGITDFIGSNPKFDIEHTIPQSVGGDSTQMNLTLCDNRFNREVKKAKLPTELANHEEILTRIEPWKNKYEQLVKERDKQRTFAGMDKAVKDIRIQKRHKLQMEIDYWRGKYERFTMTEVPEGFSRRQGTGIGLISRYAGLYLKSLFHQADSRNKSNVYVVKGVATAEFRKMWGLQSEYEKKCRDNHSHHCMDAITIACIGKREYDLMAEYYRMEETFKQGRGSKPKFSKPWATFTEDVLNIYKNLLVVHDTPNNMPKHTKKYVQTSIGKVLAQGDTARGSLHLDTYYGAIERDGEIRYVVRRPLSSFTKPEELENIVDETVKRTIKEAIADKNFKQAIAEPIYMNEEKGILIKKVRCFAKSVKQPINIRQHRDLSKKEYKQQYHVMNENNYLLAIYEGLVKNKVVREFEIVSYIEAAKYYKRSQDRNIFSSIVPTHSTKYGLPLKTKLLMGQLVLMFEENPDEIQVDNTKDLVKRLYKVVGIEKDGRIKFKYHQEARKEGLPIFSTPYKNNDDYAPIFRQSINNINILVDGIDFTIDILGKVTLKE

SEQ ID NO: 379 - protein, 1088 aa, Bacillus smithii
MNYKMGLDIGIASVGWAVINLDLKRIEDLGVRIFDKAEHPQNGESLALPRRIARSARRRLRRRKHRLERIRRLLVSENVLTKEEMNLLFKQKKQIDVWQLRVDALERKLNNDELARVLLHLAKRRGFKSNRKSERNSKESSEFLKNIEENQSILAQYRSVGEMIVKDSKFAYHKRNKLDSYSNMIARDDLEREIKLIFEKQREFNNPVCTERLEEKYLNIWSSQRPFASKEDIEKKVGFCTFEPKEKRAPKATYTFQSFIVWEHINKLRLVSPDETRALTEIERNLLYKQAFSKNKMTYYDIRKLLNLSDDIHFKGLLYDPKSSLKQIENIRFLELDSYHKIRKCIENVYGKDGIRMFNETDIDTFGYALTIFKDDEDIVAYLQNEYITKNGKRVSNLANKVYDKSLIDELLNLSFSKFAHLSMKAIRNILPYMEQGEIYSKACELAGYNFTGPKKKEKALLLPVIPNIANPVVMRALTQSRKVVNAIIKKYGSPVSIHIELARDLSHSFDERKKIQKDQTENRKKNETAIKQLIEYELTKNPTGLDIVKFKLWSEQQGRCMYSLKPIELERLLEPGYVEVDHILPYSRSLDDSYANKVLVLTKENREKGNHTPVEYLGLGSERWKKFEKFVLANKQFSKKKKQNLLRLRYEETEEKEFKERNLNDTRYISKFFANFIKEHLKFADGDGGQKVYTINGKITAHLRSRWDFNKNREESDLHHAVDAVIVACATQGMIKKITEFYKAREQNKESAKKKEPIFPQPWPHFADELKARLSKFPQESIEAFALGNYDRKKLESLRPVFVSRMPKRSVTGAAHQETLRRCVGIDEQSGKIQTAVKTKLSDIKLDKDGHFPMYQKESDPRTYEAIRQRLLEHNNDPKKAFQEPLYKPKKNGEPGPVIRTVKIIDTKNKVVHLDGSKTVAYNSNIVRTDVFEKDGKYYCVPVYTMDIMKGTLPNKAIEANKPYSEWKEMTEEYTFQFSLFPNDLVRIVLPREKTIKTSTNEEIIIKDIFAYYKTIDSATGGLELISHDRNFSLRGVGSKTLKRFEKYQVDVLGNIHKVKGEKRVGLAAPTNQKKGKTVDSLQSVSD

SEQ ID NO: 380 - protein, 1035 aa, Puniceispirillum marinum
MRRLGLDLGTNSIGWCLLDLGDDGEPVSIFRTGARIFSDGRDPKSLGSLKATRREARLTRRRRDRFIQRQKNLINALVKYGLMPADEIQRQALAYKDPYPIRKKALDEAIDPYEMGRAIFHINQRRGFKSNRKSADNEAGVVKQSIADLEMKLGEAGARTIGEFLADRQATNDTVRARRLSGTNALYEFYPDRYMLEQEFDTLWAKQAAFNPSLYIEAARERLKEIVFFQRKLKPQEVGRCIFLSDEDRISKALPSFQRFRIYQELSNLAWIDHDGVAHRITASLALRDHLFDELEHKKKLTFKAMRAILRKQGVVDYPVGFNLESDNRDHLIGNLTSCIMRDAKKMIGSAWDRLDEEEQDSFILMLQDDQKGDDEVRSILTQQYGLSDDVAEDCLDVRLPDGHGSLSKKAIDRILPVLRDQGLIYYDAVKEAGLGEANLYDPYAALSDKLDYYGKALAGHVMGASGKFEDSDEKRYGTISNPTVHIALNQVRAVVNELIRLHGKPDEVVIEIGRDLPMGADGKRELERFQKEGRAKNERARDELKKLGHIDSRESRQKFQLWEQLAKEPVDRCCPFTGKMMSISDLFSDKVEIEHLLPFSLTLDDSMANKTVCFRQANRDKGNRAPFDAFGNSPAGYDWQEILGRSQNLPYAKRWRFLPDAMKRFEADGGFLERQLNDTRYISRYTTEYISTIIPKNKIWVVTGRLTSLLRGFWGLNSILRGHNTDDGTPAKKSRDDHRHHAIDAIVVGMTSRGLLQKVSKAARRSEDLDLTRLFEGRIDPWDGFRDEVKKHIDAIIVSHRPRKKSQGALHNDTAYGIVEHAENGASTVVHRVPITSLGKQSDIEKVRDPLIKSALLNETAGLSGKSFENAVQKWCADNSIKSLRIVETVSIIPITDKEGVAYKGYKGDGNAYMDIYQDPTSSKWKGEIVSRFDANQKGFIPSWQSQFPTARLIMRLRINDLLKLQDGEIEEIYRVQRLSGSKILMAPHTEANVDARDRDKNDTFKLTSKSPGKLQSASARKVHISPTGLIREG

SEQ ID NO: 381 - protein, 1153 aa, Barnesiella intestinihominis
MKNILGLDLGLSSIGWSVIRENSEEQELVAMGSRVVSLTAAELSSFTQGNGVSINSQRTQKRTQRKGYDRYQLRRTLLRNKLDTLGMLPDDSLSYLPKLQLWGLRAKAVTQRIELNELGRVLLHLNQKRGYKSIKSDFSGDKKITDYVKTVKTRYDELKEMRLTIGELFFRRLTENAFFRCKEQVYPRQAYVEEFDCIMNCQRKFYPDILTDETIRCIRDEIIYYQRPLKSCKYLVSRCEFEKRFYLNAAGKKTEAGPKVSPRTSPLFQVCRLWESINNIVVKDRRNEIVFISAEQRAALFDFLNTHEKLKGSDLLKLLGLSKTYGYRLGEQFKTGIQGNKTRVEIERALGNYPDKKRLLQFNLQEESSSMVNTETGEIIPMISLSFEQEPLYRLWHVLYSIDDREQLQSVLRQKFGIDDDEVLERLSAIDLVKAGFGNKSSKAIRRILPFLQLGMNYAEACEAAGYNHSNNYTKAENEARALLDRLPAIKKNELRQPVVEKILNQMVNVVNALMEKYGRFDEIRVELARELKQSKEERSNTYKSINKNQRENEQIAKRIVEYGVPTRSRIQKYKMWEESKHCCIYCGQPVDVGDFLRGFDVEVEHIIPKSLYFDDSFANKVCSCRSCNKEKNNRTAYDYMKSKGEKALSDYVERVNTMYTNNQISKTKWQNLLTPVDKISIDFIDRQLRESQYIARKAKEILTSICYNVTATSGSVTSFLRHVWGWDTVLHDLNFDRYKKVGLTEVIEVNHRGSVIRREQIKDWSKRFDHRHHAIDALTIACTKQAYIQRLNNLRAEEGPDFNKMSLERYIQSQPHFSVAQVREAVDRILVSFRAGKRAVTPGKRYIRKNRKRISVQSVLIPRGALSEESVYGVIHVWEKDEQGHVIQKQRAVMKYPITSINREMLDKEKVVDKRIHRILSGRLAQYNDNPKEAFAKPVYIDKECRIPIRTVRCFAKPAINTLVPLKKDDKGNPVAWVNPGNNHHVAIYRDEDGKYKERTVTFWEAVDRCRVGIPAIVTQPDTIWDNILQRNDISENVLESLPDVKWQFVLSLQQNEMFILGMNEEDYRYAMDQQDYALLNKYLYRVQKLSKSDYSFRYHTETSVEDKYDGKPNLKLSMQMGKLKRVSIKSLLGLNPHKVHISVLGEIKEIS

SEQ ID NO: 382 - protein, 1062 aa, Ralstonia syzygii
MAEKQHRWGLDIGTNSIGWAVIALIEGRPAGLVATGSRIFSDGRNPKDGSSLAVERRGPRQMRRRRDRYLRRRDRFMQALINVGLMPGDAAARKALVTENPYVLRQRGLDQALTLPEFGRALFHLNQRRGFQSNRKTDRATAKESGKVKNAIAAFRAGMGNARTVGEALARRLEDGRPVRARMVGQGKDEHYELYIAREWIAQEFDALWASQQRFHAEVLADAARDRLRAILLFQRKLLPVPVGKCFLEPNQPRVAAALPSAQRFRLMQELNHLRVMTLADKRERPLSFQERNDLLAQLVARPKCGFDMLRKIVFGANKEAYRFTIESERRKELKGCDTAAKLAKVNALGTRWQALSLDEQDRLVCLLLDGENDAVLADALREHYGLTDAQIDTLLGLSFEDGHMRLGRSALLRVLDALESGRDEQGLPLSYDKAVVAAGYPAHTADLENGERDALPYYGELLWRYTQDAPTAKNDAERKFGKIANPTVHIGLNQLRKLVNALIQRYGKPAQIVVELARNLKAGLEEKERIKKQQTANLERNERIRQKLQDAGVPDNRENRLRMRLFEELGQGNGLGTPCIYSGRQISLQRLFSNDVQVDHILPFSKTLDDSFANKVLAQHDANRYKGNRGPFEAFGANRDGYAWDDIRARAAVLPRNKRNRFAETAMQDWLHNETDFLARQLTDTAYLSRVARQYLTAICSKDDVYVSPGRLTAMLRAKWGLNRVLDGVMEEQGRPAVKNRDDHRHHAIDAVVIGATDRAMLQQVATLAARAREQDAERLIGDMPTPWPNFLEDVRAAVARCVVSHKPDHGPEGGLHNDTAYGIVAGPFEDGRYRVRHRVSLFDLKPGDLSNVRCDAPLQAELEPIFEQDDARAREVALTALAERYRQRKVWLEELMSVLPIRPRGEDGKTLPDSAPYKAYKGDSNYCYELFINERGRWDGELISTFRANQAAYRRFRNDPARFRRYTAGGRPLLMRLCINDYIAVGTAAERTIFRVVKMSENKITLAEHFEGGTLKQRDADKDDPFKYLTKSPGALRDLGARRIFVDLIGRVLDPGIKGD

SEQ ID NO: 383 - protein, 1059 aa, Wolinella succinogenes
MIERILGVDLGISSLGWAIVEYDKDDEAANRIIDCGVRLFTAAETPKKKESPNKARREARGIRRVLNRRRVRMNMIKKLFLRAGLIQDVDLDGEGGMFYSKANRADVWELRHDGLYRLLKGDELARVLIHIAKHRGYKFIGDDEADEESGKVKKAGVVLRQNFEAAGCRTVGEWLWRERGANGKKRNKHGDYEISIHRDLLVEEVEAIFVAQQEMRSTIATDALKAAYREIAFFVRPMQRIEKMVGHCTYFPEERRAPKSAPTAEKFIAISKFFSTVIIDNEGWEQKIIERKTLEELLDFAVSREKVEFRHLRKFLDLSDNEIFKGLHYKGKPKTAKKREATLFDPNEPTELEFDKVEAEKKAWISLRGAAKLREALGNEFYGRFVALGKHADEATKILTYYKDEGQKRRELTKLPLEAEMVERLVKIGFSDFLKLSLKAIRDILPAMESGARYDEAVLMLGVPHKEKSAILPPLNKTDIDILNPTVIRAFAQFRKVANALVRKYGAFDRVHFELAREINTKGEIEDIKESQRKNEKERKEAADWIAETSFQVPLTRKNILKKRLYIQQDGRCAYTGDVIELERLFDEGYCEIDHILPRSRSADDSFANKVLCLARANQQKTDRTPYEWFGHDAARWNAFETRTSAPSNRVRTGKGKIDRLLKKNFDENSEMAFKDRNLNDTRYMARAIKTYCEQYWVFKNSHTKAPVQVRSGKLTSVLRYQWGLESKDRESHTHHAVDAIIIAFSTQGMVQKLSEYYRFKETHREKERPKLAVPLANFRDAVEEATRIENTETVKEGVEVKRLLISRPPRARVTGQAHEQTAKPYPRIKQVKNKKKWRLAPIDEEKFESFKADRVASANQKNFYETSTIPRVDVYHKKGKFHLVPIYLHEMVLNELPNLSLGTNPEAMDENFFKFSIFKDDLISIQTQGTPKKPAKIIMGYFKNMHGANMVLSSINNSPCEGFTCTPVSMDKKHKDKCKLCPEENRIAGRCLQGFLDYWSQEGLRPPRKEFECDQGVKFALDVKKYQIDPLGYYYEVKQEKRLGTIPQMRSAKKLVKK

SEQ ID NO: 384 - protein, 1269 aa, Mycoplasma gallisepticum
MNNSIKSKPEVTIGLDLGVGSVGWAIVDNETNIIHHLGSRLFSQAKTAEDRRSFRGVRRLIRRRKYKLKRFVNLIWKYNSYFGFKNKEDILNNYQEQQKLHNTVLNLKSEALNAKIDPKALSWILHDYLKNRGHFYEDNRDFNVYPTKELAKYFDKYGYYKGIIDSKEDNDNKLEEELTKYKFSNKHWLEEVKKVLSNQTGLPEKFKEEYESLFSYVRNYSEGPGSINSVSPYGIYHLDEKEGKVVQKYNNIWDKTIGKCNIFPDEYRAPKNSPIAMIFNEINELSTIRSYSIYLTGWFINQEFKKAYLNKLLDLLIKTNGEKPIDARQFKKLREETIAESIGKETLKDVENEEKLEKEDHKWKLKGLKLNTNGKIQYNDLSSLAKFVHKLKQHLKLDFLLEDQYATLDKINFLQSLFVYLGKHLRYSNRVDSANLKEFSDSNKLFERILQKQKDGLFKLFEQTDKDDEKILAQTHSLSTKAMLLAITRMTNLDNDEDNQKNNDKGWNFEAIKNFDQKFIDITKKNNNLSLKQNKRYLDDRFINDAILSPGVKRILREATKVFNAILKQFSEEYDVTKVVIELARELSEEKELENTKNYKKLIKKNGDKISEGLKALGISEDEIKDILKSPTKSYKFLLWLQQDHIDPYSLKEIAFDDIFTKTEKFEIDHIIPYSISFDDSSSNKLLVLAESNQAKSNQTPYEFISSGNAGIKWEDYEAYCRKFKDGDSSLLDSTQRSKKFAKMMKTDTSSKYDIGFLARNLNDTRYATIVFRDALEDYANNHLVEDKPMFKVVCINGSVTSFLRKNFDDSSYAKKDRDKNIHHAVDASIISIFSNETKTLFNQLTQFADYKLFKNTDGSWKKIDPKTGVVTEVTDENWKQIRVRNQVSEIAKVIEKYIQDSNIERKARYSRKIENKTNISLFNDTVYSAKKVGYEDQIKRKNLKTLDIHESAKENKNSKVKRQFVYRKLVNVSLLNNDKLADLFAEKEDILMYRANPWVINLAEQIFNEYTENKKIKSQNVFEKYMLDLTKEFPEKFSEFLVKSMLRNKTAIIYDDKKNIVHRIKRLKMLSSELKENKLSNVIIRSKNQSGTKLSYQDTINSLALMIMRSIDPTAKKQYIRVPLNTLNLHLGDHDFDLHNMDAYLKKPKFVKYLKANEIGDEYKPWRVLTSGTLLIHKKDKKLMYISSFQNLNDVIEIKNLIETEYKENDDSDSKKKKKANRFLMTLSTILNDYILLDAKDNFDILGLSKNRIDEILNSKLGLDKIVK

SEQ ID NO: 385 - protein, 1138 aa, Acidothermus cellulolyticus
MGGSEVGTVPVTWRLGVDVGERSIGLAAVSYEEDKPKEILAAVSWIHDGGVGDERSGASRLALRGMARRARRLRRFRRARLRDLDMLLSELGWTPLPDKNVSPVDAWLARKRLAEEYVVDETERRRLLGYAVSHMARHRGWRNPWTTIKDLKNLPQPSDSWERTRESLEARYSVSLEPGTVGQWAGYLLQRAPGIRLNPTQQSAGRRAELSNATAFETRLRQEDVLWELRCIADVQGLPEDVVSNVIDAVFCQKRPSVPAERIGRDPLDPSQLRASRACLEFQEYRIVAAVANLRIRDGSGSRPLSLEERNAVIEALLAQTERSLTWSDIALEILKLPNESDLTSVPEEDGPSSLAYSQFAPFDETSARIAEFIAKNRRKIPTFAQWWQEQDRTSRSDLVAALADNSIAGEEEQELLVHLPDAELEALEGLALPSGRVAYSRLTLSGLTRVMRDDGVDVHNARKTCFGVDDNWRPPLPALHEATGHPVVDRNLAILRKFLSSATMRWGPPQSIVVELARGASESRERQAEEEAARRAHRKANDRIRAELRASGLSDPSPADLVRARLLELYDCHCMYCGAPISWENSELDHIVPRTDGGSNRHENLAITCGACNKEKGRRPFASWAETSNRVQLRDVIDRVQKLKYSGNMYWTRDEFSRYKKSVVARLKRRTSDPEVIQSIESTGYAAVALRDRLLSYGEKNGVAQVAVFRGGVTAEARRWLDISIERLFSRVAIFAQSTSTKRLDRRHHAVDAVVLTTLTPGVAKTLADARSRRVSAEFWRRPSDVNRHSTEEPQSPAYRQWKESCSGLGDLLISTAARDSIAVAAPLRLRPTGALHEETLRAFSEHTVGAAWKGAELRRIVEPEVYAAFLALTDPGGRFLKVSPSEDVLPADENRHIVLSDRVLGPRDRVKLFPDDRGSIRVRGGAAYIASFHHARVFRWGSSHSPSFALLRVSLADLAVAGLLRDGVDVFTAELPPWTPAWRYASIALVKAVESGDAKQVGWLVPGDELDFGPEGVTTAAGDLSMFLKYFPERHWVVTGFEDDKRINLKPAFLSAEQAEVLRTERSDRPDTLTEAGEILAQFFPRCWRATVAKVLCHPGLTVIRRTALGQPRWRRGHLPYSWRPWSADPWSGGTP

SEQ ID NO: 386 - protein, 1265 aa, Mycoplasma ovipneumoniae
MHNKKNITIGFDLGIASIGWAIIDSTTSKILDWGTRTFEERKTANERRAFRSTRRNIRRKAYRNQRFINLILKYKDLFELKNISDIQRANKKDTENYEKIISFFTEIYKKCAAKHSNILEVKVKALDSKIEKLDLIWILHDYLENRGFFYDLEEENVADKYEGIEHPSILLYDFFKKNGFFKSNSSIPKDLGGYSFSNLQWVNEIKKLFEVQEINPEFSEKFLNLFTSVRDYAKGPGSEHSASEYGIFQKDEKGKVFKKYDNIWDKTIGKCSFFVEENRSPVNYPSYEIFNLLNQLINLSTDLKTTNKKIWQLSSNDRNELLDELLKVKEKAKIISISLKKNEIKKIILKDFGFEKSDIDDQDTIEGRKIIKEEPTTKLEVTKHLLATIYSHSSDSNWININNILEFLPYLDAICIILDREKSRGQDEVLKKLTEKNIFEVLKIDREKQLDFVKSIFSNTKFNFKKIGNFSLKAIREFLPKMFEQNKNSEYLKWKDEEIRRKWEEQKSKLGKTDKKTKYLNPRIFQDEIISPGTKNTFEQAVLVLNQIIKKYSKENIIDAIIIESPREKNDKKTIEEIKKRNKKGKGKTLEKLFQILNLENKGYKLSDLETKPAKLLDRLRFYHQQDGIDLYTLDKINIDQLINGSQKYEIEHIIPYSMSYDNSQANKILTEKAENLKKGKLIASEYIKRNGDEFYNKYYEKAKELFINKYKKNKKLDSYVDLDEDSAKNRFRFLTLQDYDEFQVEFLARNLNDTRYSTKLFYHALVEHFENNEFFTYIDENSSKHKVKISTIKGHVTKYFRAKPVQKNNGPNENLNNNKPEKIEKNRENNEHHAVDAAIVAIIGNKNPQIANLLTLADNKTDKKFLLHDENYKENIETGELVKIPKFEVDKLAKVEDLKKIIQEKYEEAKKHTAIKFSRKTRTILNGGLSDETLYGFKYDEKEDKYFKIIKKKLVTSKNEELKKYFENPFGKKADGKSEYTVLMAQSHLSEFNKLKEIFEKYNGFSNKTGNAFVEYMNDLALKEPTLKAEIESAKSVEKLLYYNFKPSDQFTYHDNINNKSFKRFYKNIRIIEYKSIPIKFKILSKHDGGKSFKDTLFSLYSLVYKVYENGKESYKSIPVTSQMRNFGIDEFDFLDENLYNKEKLDIYKSDFAKPIPVNCKPVFVLKKGSILKKKSLDIDDFKETKETEEGNYYFISTISKRFNRDTAYGLKPLKLSVVKPVAEPSTNPIFKEYIPIHLDELGNEYPVKIKEHTDDEKLMCTIK

SEQ ID NO: 387 - RNA, 20 nt, Artificial Sequence
  Synthetic
aaggugaacguggaugaagu

SEQ ID NO: 388 - RNA, 20 nt, Artificial Sequence
  Synthetic
guaacggcagacuucuccuc

SEQ ID NO: 389 - RNA, 17 nt, Artificial Sequence
  Synthetic
gugaacguggaugaagu

SEQ ID NO: 390 - RNA, 17 nt, Artificial Sequence
  Synthetic
acggcagacuucuccuc

SEQ ID NO: 391 - RNA, 20 nt, Artificial Sequence
  Synthetic
gaaguugguggugaggcccu

SEQ ID NO: 392 - RNA, 20 nt, Artificial Sequence
  Synthetic
gcaaccucaaacagacacca

SEQ ID NO: 393 - RNA, 17 nt, Artificial Sequence
  Synthetic
gccccacagggcaguaa

SEQ ID NO: 394 - RNA, 17 nt, Artificial Sequence
  Synthetic
gccguuacugcccugug

SEQ ID NO: 395 - RNA, 17 nt, Artificial Sequence
  Synthetic
ggagaccaauagaaacu

SEQ ID NO: 396 - RNA, 17 nt, Artificial Sequence
  Synthetic
ggaugaaguugguggug

SEQ ID NO: 397 - RNA, 17 nt, Artificial Sequence
  Synthetic
ggugcaucugacuccug

SEQ ID NO: 398 - RNA, 20 nt, Artificial Sequence
  Synthetic
gucugccguuacugcccugu

SEQ ID NO: 399 - RNA, 20 nt, Artificial Sequence
  Synthetic
gugaacguggaugaaguugg

SEQ ID NO: 400 - RNA, 17 nt, Artificial Sequence
  Synthetic
guggggcaaggugaacg

SEQ ID NO: 401 - RNA, 17 nt, Artificial Sequence
  Synthetic
guggugaggcccugggc

SEQ ID NO: 402 - RNA, 17 nt, Artificial Sequence
  Synthetic
guuacaagacagguuua

SEQ ID NO: 403 - RNA, 17 nt, Artificial Sequence
  Synthetic
guucaccuugccccaca

SEQ ID NO: 404 - RNA, 17 nt, Artificial Sequence
  Synthetic
guugguggugaggcccu

SEQ ID NO: 405 - RNA, 17 nt, Artificial Sequence
  Synthetic
aacguggaugaaguugg

SEQ ID NO: 406 - RNA, 20 nt, Artificial Sequence
  Synthetic
aagguuacaagacagguuua

SEQ ID NO: 407 - RNA, 17 nt, Artificial Sequence
  Synthetic
acaugcccaguuucuau

SEQ ID NO: 408 - RNA, 17 nt, Artificial Sequence
  Synthetic
accauggugucuguuug

SEQ ID NO: 409 - RNA, 17 nt, Artificial Sequence
  Synthetic
accucaaacagacacca

SEQ ID NO: 410 - RNA, 20 nt, Artificial Sequence
  Synthetic
accuugauaccaaccugccc

SEQ ID NO: 411 - RNA, 17 nt, Artificial Sequence
  Synthetic
aggagaccaauagaaac

SEQ ID NO: 412 - RNA, 17 nt, Artificial Sequence
  Synthetic
aggagucagaugcacca

SEQ ID NO: 413 - RNA, 20 nt, Artificial Sequence
  Synthetic
agucugccguuacugcccug

SEQ ID NO: 414 - RNA, 17 nt, Artificial Sequence
  Synthetic
aguugguggugaggccc

SEQ ID NO: 415 - RNA, 20 nt, Artificial Sequence
  Synthetic
cacguucaccuugccccaca

SEQ ID NO: 416 - RNA, 20 nt, Artificial Sequence
  Synthetic
cauggugcaucugacuccug

SEQ ID NO: 417 - RNA, 20 nt, Artificial Sequence
  Synthetic
ccacguucaccuugccccac

SEQ ID NO: 418 - RNA, 20 nt, Artificial Sequence
  Synthetic
cccugggcagguugguauca

SEQ ID NO: 419 - RNA, 20 nt, Artificial Sequence
  Synthetic
ccuguggggcaaggugaacg

SEQ ID NO: 420 - RNA, 20 nt, Artificial Sequence
  Synthetic
ccuugauaccaaccugccca

SEQ ID NO: 421 - RNA, 20 nt, Artificial Sequence
  Synthetic
cguggaugaaguugguggug

SEQ ID NO: 422 - RNA, 20 nt, Artificial Sequence
  Synthetic
cguuacugcccuguggggca

SEQ ID NO: 423 - RNA, 17 nt, Artificial Sequence
  Synthetic
cguucaccuugccccac

SEQ ID NO: 424 - RNA, 20 nt, Artificial Sequence
  Synthetic
cucaggagucagaugcacca

SEQ ID NO: 425 - RNA, 17 nt, Artificial Sequence
  Synthetic
cugccguuacugcccug

SEQ ID NO: 426 - RNA, 20 nt, Artificial Sequence
  Synthetic
cuugccccacagggcaguaa

SEQ ID NO: 427 - RNA, 20 nt, Artificial Sequence
  Synthetic
uaaggagaccaauagaaacu

SEQ ID NO: 428 - RNA, 17 nt, Artificial Sequence
  Synthetic
uacugcccuguggggca

SEQ ID NO: 429 - RNA, 17 nt, Artificial Sequence
  Synthetic
uaucaagguuacaagac

SEQ ID NO: 430 - RNA, 20 nt, Artificial Sequence
  Synthetic
ucugccguuacugcccugug

SEQ ID NO: 431 - RNA, 20 nt, Artificial Sequence
  Synthetic
ugaaguugguggugaggccc

SEQ ID NO: 432 - RNA, 17 nt, Artificial Sequence
  Synthetic
ugaggcccugggcaggu

SEQ ID NO: 433 - RNA, 17 nt, Artificial Sequence
  Synthetic
ugauaccaaccugccca

SEQ ID NO: 434 - RNA, 20 nt, Artificial Sequence
  Synthetic
ugcaccauggugucuguuug

SEQ ID NO: 435 - RNA, 17 nt, Artificial Sequence
  Synthetic
ugccguuacugcccugu

SEQ ID NO: 436 - RNA, 17 nt, Artificial Sequence
  Synthetic
ugggcagguugguauca

SEQ ID NO: 437 - RNA, 20 nt, Artificial Sequence
  Synthetic
ugguaucaagguuacaagac

SEQ ID NO: 438 - RNA, 20 nt, Artificial Sequence
  Synthetic
uggugaggcccugggcaggu

SEQ ID NO: 439 - RNA, 20 nt, Artificial Sequence
  Synthetic
uuaaggagaccaauagaaac

SEQ ID NO: 440 - RNA, 17 nt, Artificial Sequence
  Synthetic
uugauaccaaccugccc

SEQ ID NO: 441 - RNA, 20 nt, Artificial Sequence
  Synthetic
uugguggugaggcccugggc

SEQ ID NO: 442 - RNA, 20 nt, Artificial Sequence
  Synthetic
caccauggugcaucugacuc

SEQ ID NO: 443 - RNA, 20 nt, Artificial Sequence
  Synthetic
ccauggugcaucugacuccu

SEQ ID NO: 444 - RNA, 20 nt, Artificial Sequence
  Synthetic
cauggugcaucugacuccug

SEQ ID NO: 445 - RNA, 20 nt, Artificial Sequence
  Synthetic
uggugcaucugacuccugag

SEQ ID NO: 446 - RNA, 20 nt, Artificial Sequence
  Synthetic
aagucugccguuacugcccu

SEQ ID NO: 447 - RNA, 20 nt, Artificial Sequence
  Synthetic
agucugccguuacugcccug

SEQ ID NO: 448 - RNA, 20 nt, Artificial Sequence
  Synthetic
uuacugcccuguggggcaag

SEQ ID NO: 449 - RNA, 20 nt, Artificial Sequence
  Synthetic
cccuguggggcaaggugaac

SEQ ID NO: 450 - RNA, 20 nt, Artificial Sequence
  Synthetic
guggggcaaggugaacgugg

SEQ ID NO: 451 - RNA, 20 nt, Artificial Sequence
  Synthetic
gaacguggaugaaguuggug

SEQ ID NO: 452 - RNA, 20 nt, Artificial Sequence
  Synthetic
augaaguugguggugaggcc

SEQ ID NO: 453 - RNA, 20 nt, Artificial Sequence
  Synthetic
caagguuacaagacagguuu

SEQ ID NO: 454 - RNA, 20 nt, Artificial Sequence
  Synthetic
aagguuacaagacagguuua

SEQ ID NO: 455 - RNA, 20 nt, Artificial Sequence
  Synthetic
gacagguuuaaggagaccaa

SEQ ID NO: 456 - RNA, 20 nt, Artificial Sequence
  Synthetic
uuuaaggagaccaauagaaa

SEQ ID NO: 457 - RNA, 17 nt, Artificial Sequence
  Synthetic
cauggugcaucugacuc

SEQ ID NO: 458 - RNA, 17 nt, Artificial Sequence
  Synthetic
uggugcaucugacuccu

SEQ ID NO: 459 - RNA, 17 nt, Artificial Sequence
  Synthetic
ggugcaucugacuccug

SEQ ID NO: 460 - RNA, 17 nt, Artificial Sequence
  Synthetic
ugcaucugacuccugag

SEQ ID NO: 461 - RNA, 17 nt, Artificial Sequence
  Synthetic
ucugccguuacugcccu

SEQ ID NO: 462 - RNA, 17 nt, Artificial Sequence
  Synthetic
cugccguuacugcccug

SEQ ID NO: 463 - RNA, 17 nt, Artificial Sequence
  Synthetic
cugcccuguggggcaag

SEQ ID NO: 464 - RNA, 17 nt, Artificial Sequence
  Synthetic
uguggggcaaggugaac

SEQ ID NO: 465 - RNA, 17 nt, Artificial Sequence
  Synthetic
gggcaaggugaacgugg

SEQ ID NO: 466 - RNA, 17 nt, Artificial Sequence
  Synthetic
cguggaugaaguuggug

SEQ ID NO: 467 - RNA, 17 nt, Artificial Sequence
  Synthetic
aaguugguggugaggcc

SEQ ID NO: 468 - RNA, 17 nt, Artificial Sequence
  Synthetic
gguuacaagacagguuu

SEQ ID NO: 469 - RNA, 17 nt, Artificial Sequence
  Synthetic
guuacaagacagguuua

SEQ ID NO: 470 - RNA, 17 nt, Artificial Sequence
  Synthetic
agguuuaaggagaccaa

SEQ ID NO: 471 - RNA, 17 nt, Artificial Sequence
  Synthetic
aaggagaccaauagaaa

SEQ ID NO: 472 - RNA, 20 nt, Artificial Sequence
  Synthetic
gcuagugaacacaguugugu

SEQ ID NO: 473 - RNA, 20 nt, Artificial Sequence
  Synthetic
gugucuguuugagguugcua

SEQ ID NO: 474 - RNA, 20 nt, Artificial Sequence
  Synthetic
agaugcaccauggugucugu

SEQ ID NO: 475 - RNA, 20 nt, Artificial Sequence
  Synthetic
guaacggcagacuucuccuc

SEQ ID NO: 476 - RNA, 20 nt, Artificial Sequence
  Synthetic
aguaacggcagacuucuccu

SEQ ID NO: 477 - RNA, 20 nt, Artificial Sequence
  Synthetic
uccacguucaccuugcccca

SEQ ID NO: 478 - RNA, 20 nt, Artificial Sequence
  Synthetic
aaccuugauaccaaccugcc

SEQ ID NO: 479 - RNA, 17 nt, Artificial Sequence
  Synthetic
agugaacacaguugugu

SEQ ID NO: 480 - RNA, 17 nt, Artificial Sequence
  Synthetic
ucuguuugagguugcua

SEQ ID NO: 481 - RNA, 17 nt, Artificial Sequence
  Synthetic
ugcaccauggugucugu

SEQ ID NO: 482 - RNA, 17 nt, Artificial Sequence
  Synthetic
acggcagacuucuccuc

SEQ ID NO: 483 - RNA, 17 nt, Artificial Sequence
  Synthetic
aacggcagacuucuccu

SEQ ID NO: 484 - RNA, 17 nt, Artificial Sequence
  Synthetic
acguucaccuugcccca

SEQ ID NO: 485 - RNA, 17 nt, Artificial Sequence
  Synthetic
cuugauaccaaccugcc

SEQ ID NO: 486-499 - skipped (14 entries)

SEQ ID NO: 500 - RNA, 20 nt, Artificial Sequence
  Synthetic
guaacggcagacuucuccuc

SEQ ID NO: 501 - RNA, 20 nt, Artificial Sequence
  Synthetic
aaggugaacguggaugaagu

SEQ ID NO: 502-6802 - skipped (6301 entries)

SEQ ID NO: 6803 - RNA, 17 nt, Artificial Sequence
  Synthetic
ggugcaccugacuccug

SEQ ID NO: 6804 - RNA, 20 nt, Artificial Sequence
  Synthetic
guaacggcagacuucuccac

SEQ ID NO: 6805 - RNA, 17 nt, Artificial Sequence
  Synthetic
acggcagacuucuccac

SEQ ID NO: 6806 - RNA, 17 nt, Artificial Sequence
  Synthetic
acuucuccacaggaguc

SEQ ID NO: 6807 - RNA, 17 nt, Artificial Sequence
  Synthetic
aggagucaggugcacca

SEQ ID NO: 6808 - RNA, 20 nt, Artificial Sequence
  Synthetic
cauggugcaccugacuccug

SEQ ID NO: 6809 - RNA, 20 nt, Artificial Sequence
  Synthetic
cacaggagucaggugcacca

SEQ ID NO: 6810 - RNA, 20 nt, Artificial Sequence
  Synthetic
cagacuucuccacaggaguc

SEQ ID NO: 6811 - RNA, 20 nt, Artificial Sequence
  Synthetic
gaaguugguggugaggcccu

SEQ ID NO: 6812 - RNA, 20 nt, Artificial Sequence
  Synthetic
gcaaccucaaacagacacca

SEQ ID NO: 6813 - RNA, 17 nt, Artificial Sequence
  Synthetic
gccccacagggcaguaa

SEQ ID NO: 6814 - RNA, 17 nt, Artificial Sequence
  Synthetic
gccguuacugcccugug

SEQ ID NO: 6815 - RNA, 17 nt, Artificial Sequence
  Synthetic
ggaugaaguugguggug

SEQ ID NO: 6816 - RNA, 20 nt, Artificial Sequence
  Synthetic
gucugccguuacugcccugu

SEQ ID NO: 6817 - RNA, 17 nt, Artificial Sequence
  Synthetic
gugaacguggaugaagu

SEQ ID NO: 6818 - RNA, 20 nt, Artificial Sequence
  Synthetic
gugaacguggaugaaguugg

SEQ ID NO: 6819 - RNA, 17 nt, Artificial Sequence
  Synthetic
guggggcaaggugaacg

SEQ ID NO: 6820 - RNA, 17 nt, Artificial Sequence
  Synthetic
guggugaggcccugggc

SEQ ID NO: 6821 - RNA, 17 nt, Artificial Sequence
  Synthetic
guucaccuugccccaca

SEQ ID NO: 6822 - RNA, 17 nt, Artificial Sequence
  Synthetic
guugguggugaggcccu

SEQ ID NO: 6823 - RNA, 17 nt, Artificial Sequence
  Synthetic
aacguggaugaaguugg

SEQ ID NO: 6824 - RNA, 20 nt, Artificial Sequence
  Synthetic
aagcaaauguaagcaauaga

SEQ ID NO: 6825 - RNA, 20 nt, Artificial Sequence
  Synthetic
aaggugaacguggaugaagu

SEQ ID NO: 6826 - RNA, 17 nt, Artificial Sequence
  Synthetic
accauggugucuguuug

SEQ ID NO: 6827 - RNA, 17 nt, Artificial Sequence
  Synthetic
accucaaacagacacca

SEQ ID NO: 6828 - RNA, 20 nt, Artificial Sequence
  Synthetic
accuugauaccaaccugccc

SEQ ID NO: 6829 - RNA, 20 nt, Artificial Sequence
  Synthetic
agucugccguuacugcccug

SEQ ID NO: 6830 - RNA, 17 nt, Artificial Sequence
  Synthetic
aguugguggugaggccc

SEQ ID NO: 6831 - RNA, 17 nt, Artificial Sequence
  Synthetic
caaauguaagcaauaga

SEQ ID NO: 6832 - RNA, 20 nt, Artificial Sequence
  Synthetic
cacguucaccuugccccaca

SEQ ID NO: 6833 - RNA, 20 nt, Artificial Sequence
  Synthetic
ccacguucaccuugccccac

SEQ ID NO: 6834 - RNA, 20 nt, Artificial Sequence
  Synthetic
cccugggcagguugguauca

SEQ ID NO: 6835 - RNA, 20 nt, Artificial Sequence
  Synthetic
ccuguggggcaaggugaacg

SEQ ID NO: 6836 - RNA, 20 nt, Artificial Sequence
  Synthetic
ccuugauaccaaccugccca

SEQ ID NO: 6837 - RNA, 20 nt, Artificial Sequence
  Synthetic
cguggaugaaguugguggug

SEQ ID NO: 6838 - RNA, 20 nt, Artificial Sequence
  Synthetic
cguuacugcccuguggggca

SEQ ID NO: 6839 - RNA, 17 nt, Artificial Sequence
  Synthetic
cguucaccuugccccac

SEQ ID NO: 6840 - RNA, 17 nt, Artificial Sequence
  Synthetic
cugccguuacugcccug

SEQ ID NO: 6841 - RNA, 20 nt, Artificial Sequence
  Synthetic
cuugccccacagggcaguaa

SEQ ID NO: 6842 - RNA, 17 nt, Artificial Sequence
  Synthetic
uacugcccuguggggca

SEQ ID NO: 6843 - RNA, 17 nt, Artificial Sequence
  Synthetic
uaucaagguuacaagac

SEQ ID NO: 6844 - RNA, 20 nt, Artificial Sequence
  Synthetic
ucugccguuacugcccugug

SEQ ID NO: 6845 - RNA, 20 nt, Artificial Sequence
  Synthetic
ugaaguugguggugaggccc

SEQ ID NO: 6846 - RNA, 17 nt, Artificial Sequence
  Synthetic
ugaggcccugggcaggu

SEQ ID NO: 6847 - RNA, 17 nt, Artificial Sequence
  Synthetic
ugauaccaaccugccca

SEQ ID NO: 6848 - RNA, 20 nt, Artificial Sequence
  Synthetic
ugcaccauggugucuguuug

SEQ ID NO: 6849 - RNA, 17 nt, Artificial Sequence
  Synthetic
ugccguuacugcccugu

SEQ ID NO: 6850 - RNA, 17 nt, Artificial Sequence
  Synthetic
ugggcagguugguauca

SEQ ID NO: 6851 - RNA, 20 nt, Artificial Sequence
  Synthetic
ugguaucaagguuacaagac

SEQ ID NO: 6852 - RNA, 20 nt, Artificial Sequence
  Synthetic
uggugaggcccugggcaggu

SEQ ID NO: 6853 - RNA, 17 nt, Artificial Sequence
  Synthetic
uugauaccaaccugccc

SEQ ID NO: 6854 - RNA, 20 nt, Artificial Sequence
  Synthetic
uugguggugaggcccugggc

SEQ ID NO: 6855 - RNA, 20 nt, Artificial Sequence
  Synthetic
guaacggcagacuucuccac

SEQ ID NO: 6856 - RNA, 20 nt, Artificial Sequence
  Synthetic
cccuguggggcaagguggac

SEQ ID NO: 6857 - RNA, 20 nt, Artificial Sequence
  Synthetic
agucugccguuacugcccug

SEQ ID NO: 6858 - RNA, 20 nt, Artificial Sequence
  Synthetic
aagucugccguuacugcccu

SEQ ID NO: 6859 - RNA, 20 nt, Artificial Sequence
  Synthetic
aaccuugauaccaaccugcc

SEQ ID NO: 6860 - RNA, 20 nt, Artificial Sequence
  Synthetic
uccacguucaccuugcccca

SEQ ID NO: 6861 - RNA, 20 nt, Artificial Sequence
  Synthetic
gcuagugaacacaguugugu

SEQ ID NO: 6862 - RNA, 20 nt, Artificial Sequence
  Synthetic
ccauggugcaccugacuccu

SEQ ID NO: 6863 - RNA, 20 nt, Artificial Sequence
  Synthetic
cauggugcaccugacuccug

SEQ ID NO: 6864 - RNA, 20 nt, Artificial Sequence
  Synthetic
aggugcaccauggugucugu

SEQ ID NO: 6865 - RNA, 20 nt, Artificial Sequence
  Synthetic
uggugcaccugacuccugug

SEQ ID NO: 6866 - RNA, 20 nt, Artificial Sequence
  Synthetic
gaacguggaugaaguuggug

SEQ ID NO: 6867 - RNA, 20 nt, Artificial Sequence
  Synthetic
uuacugcccuguggggcaag

SEQ ID NO: 6868 - RNA, 20 nt, Artificial Sequence
  Synthetic
gugucuguuugagguugcua

SEQ ID NO: 6869 - RNA, 20 nt, Artificial Sequence
  Synthetic
guggggcaaggugaacgugg

SEQ ID NO: 6870 - RNA, 20 nt, Artificial Sequence
  Synthetic
augaaguugguggugaggcc

SEQ ID NO: 6871 - RNA, 20 nt, Artificial Sequence
  Synthetic
aguaacggcagacuucucca

SEQ ID NO: 6872-16009 - skipped (9138 entries)

SEQ ID NO: 16010 - RNA, 17 nt, Artificial Sequence
  Synthetic
guucaccuugccccaca

SEQ ID NO: 16011 - RNA, 17 nt, Artificial Sequence
  Synthetic
aggagucaggugcacca

SEQ ID NO: 16012 - RNA, 17 nt, Artificial Sequence
  Synthetic
uacugcccuguggggca

SEQ ID NO: 16013 - RNA, 17 nt, Artificial Sequence
  Synthetic
gcugggcauaaaaguca

SEQ ID NO: 16014 - RNA, 17 nt, Artificial Sequence
  Synthetic
guuacaagacagguuua

SEQ ID NO: 16015 - RNA, 17 nt, Artificial Sequence
  Synthetic
aggagaccaauagaaac

SEQ ID NO: 16016 - RNA, 17 nt, Artificial Sequence
  Synthetic
cguucaccuugccccac

SEQ ID NO: 16017 - RNA, 17 nt, Artificial Sequence
  Synthetic
acggcagacuucuccac

SEQ ID NO: 16018 - RNA, 17 nt, Artificial Sequence
  Synthetic
uaucaagguuacaagac

SEQ ID NO: 16019 - RNA, 17 nt, Artificial Sequence
  Synthetic
acuuuuaugcccagccc

SEQ ID NO: 16020 - RNA, 17 nt, Artificial Sequence
  Synthetic
ggcugggcauaaaaguc

SEQ ID NO: 16021 - RNA, 17 nt, Artificial Sequence
  Synthetic
acuucuccacaggaguc

SEQ ID NO: 16022 - RNA, 17 nt, Artificial Sequence
  Synthetic
aauagaaacugggcaug

SEQ ID NO: 16023 - RNA, 17 nt, Artificial Sequence
  Synthetic
cugccguuacugcccug

SEQ ID NO: 16024 - RNA, 17 nt, Artificial Sequence
  Synthetic
ggaugaaguugguggug

SEQ ID NO: 16025 - RNA, 17 nt, Artificial Sequence
  Synthetic
gccguuacugcccugug

SEQ ID NO: 16026 - RNA, 17 nt, Artificial Sequence
  Synthetic
acaugcccaguuucuau

SEQ ID NO: 16027 - RNA, 17 nt, Artificial Sequence
  Synthetic
ggagaccaauagaaacu

SEQ ID NO: 16028 - RNA, 17 nt, Artificial Sequence
  Synthetic
gugaacguggaugaagu

SEQ ID NO: 16029 - RNA, 17 nt, Artificial Sequence
  Synthetic
ugccguuacugcccugu

SEQ ID NO: 16030 - RNA, 20 nt, Artificial Sequence
  Synthetic
cuugccccacagggcaguaa

SEQ ID NO: 16031 - RNA, 20 nt, Artificial Sequence
  Synthetic
cacguucaccuugccccaca

SEQ ID NO: 16032 - RNA, 20 nt, Artificial Sequence
  Synthetic
cacaggagucaggugcacca

SEQ ID NO: 16033 - RNA, 20 nt, Artificial Sequence
  Synthetic
agcagggagggcaggagcca

SEQ ID NO: 16034 - RNA, 20 nt, Artificial Sequence
  Synthetic
cguuacugcccuguggggca

SEQ ID NO: 16035 - RNA, 20 nt, Artificial Sequence
  Synthetic
agggcugggcauaaaaguca

SEQ ID NO: 16036 - RNA, 20 nt, Artificial Sequence
  Synthetic
aagcaaauguaagcaauaga

SEQ ID NO: 16037 - RNA, 20 nt, Artificial Sequence
  Synthetic
aagguuacaagacagguuua

SEQ ID NO: 16038 - RNA, 20 nt, Artificial Sequence
  Synthetic
uuaaggagaccaauagaaac

SEQ ID NO: 16039 - RNA, 20 nt, Artificial Sequence
  Synthetic
guaacggcagacuucuccac

SEQ ID NO: 16040 - RNA, 20 nt, Artificial Sequence
  Synthetic
ugguaucaagguuacaagac

SEQ ID NO: 16041 - RNA, 20 nt, Artificial Sequence
  Synthetic
cugacuuuuaugcccagccc

SEQ ID NO: 16042 - RNA, 20 nt, Artificial Sequence
  Synthetic
ugaaguugguggugaggccc

SEQ ID NO: 16043 - RNA, 20 nt, Artificial Sequence
  Synthetic
gagcagggagggcaggagcc

SEQ ID NO: 16044 - RNA, 20 nt, Artificial Sequence
  Synthetic
cagggcugggcauaaaaguc

SEQ ID NO: 16045 - RNA, 20 nt, Artificial Sequence
  Synthetic
cagacuucuccacaggaguc

SEQ ID NO: 16046 - RNA, 20 nt, Artificial Sequence
  Synthetic
gugaacguggaugaaguugg

SEQ ID NO: 16047 - RNA, 20 nt, Artificial Sequence
  Synthetic
accaauagaaacugggcaug

SEQ ID NO: 16048 - RNA, 20 nt, Artificial Sequence
  Synthetic
agucugccguuacugcccug

SEQ ID NO: 16049 - RNA, 20 nt, Artificial Sequence
  Synthetic
cguggaugaaguugguggug

SEQ ID NO: 16050 - RNA, 20 nt, Artificial Sequence
  Synthetic
ucugccguuacugcccugug

SEQ ID NO: 16051 - RNA, 20 nt, Artificial Sequence
  Synthetic
uaaggagaccaauagaaacu

SEQ ID NO: 16052 - RNA, 20 nt, Artificial Sequence
  Synthetic
gaaguugguggugaggcccu

SEQ ID NO: 16053 - RNA, 20 nt, Artificial Sequence
  Synthetic
ggagggcaggagccagggcu

SEQ ID NO: 16054 - RNA, 20 nt, Artificial Sequence
  Synthetic
aaggugaacguggaugaagu

SEQ ID NO: 16055 - RNA, 20 nt, Artificial Sequence
  Synthetic
gucugccguuacugcccugu

SEQ ID NO: 16056 - RNA, 17 nt, Artificial Sequence
  Synthetic
gccccacagggcaguaa

SEQ ID NO: 16057 - RNA, 17 nt, Artificial Sequence
  Synthetic
guggugaggcccugggc

SEQ ID NO: 16058 - RNA, 17 nt, Artificial Sequence
  Synthetic
guggggcaaggugaacg

SEQ ID NO: 16059 - RNA, 17 nt, Artificial Sequence
  Synthetic
ggugcaccugacuccug

SEQ ID NO: 16060 - RNA, 17 nt, Artificial Sequence
  Synthetic
guugguggugaggcccu

SEQ ID NO: 16061 - RNA, 17 nt, Artificial Sequence
  Synthetic
gggcaggagccagggcu

SEQ ID NO: 16062 - RNA, 20 nt, Artificial Sequence
  Synthetic
gcaaccucaaacagacacca

SEQ ID NO: 16063 - RNA, 20 nt, Artificial Sequence
  Synthetic
gggagggcaggagccagggc

SEQ ID NO: 16064 - RNA, 17 nt, Artificial Sequence
  Synthetic
accucaaacagacacca

SEQ ID NO: 16065 - RNA, 17 nt, Artificial Sequence
  Synthetic
ugauaccaaccugccca

SEQ ID NO: 16066 - RNA, 17 nt, Artificial Sequence
  Synthetic
agggagggcaggagcca

SEQ ID NO: 16067 - RNA, 17 nt, Artificial Sequence
  Synthetic
ugggcagguugguauca

SEQ ID NO: 16068 - RNA, 17 nt, Artificial Sequence
  Synthetic
caaauguaagcaauaga

SEQ ID NO: 16069 - RNA, 17 nt, Artificial Sequence
  Synthetic
aguugguggugaggccc

SEQ ID NO: 16070 - RNA, 17 nt, Artificial Sequence
  Synthetic
uugauaccaaccugccc

SEQ ID NO: 16071 - RNA, 17 nt, Artificial Sequence
  Synthetic
cagggagggcaggagcc

SEQ ID NO: 16072 - RNA, 17 nt, Artificial Sequence
  Synthetic
agggcaggagccagggc

SEQ ID NO: 16073 - RNA, 17 nt, Artificial Sequence
  Synthetic
aacguggaugaaguugg

SEQ ID NO: 16074 - RNA, 17 nt, Artificial Sequence
  Synthetic
accauggugucuguuug

SEQ ID NO: 16075 - RNA, 17 nt, Artificial Sequence
  Synthetic
ugaggcccugggcaggu

SEQ ID NO: 16076 - RNA, 20 nt, Artificial Sequence
  Synthetic
ccuugauaccaaccugccca

SEQ ID NO: 16077 - RNA, 20 nt, Artificial Sequence
  Synthetic
cccugggcagguugguauca

SEQ ID NO: 16078 - RNA, 20 nt, Artificial Sequence
  Synthetic
ccacguucaccuugccccac

SEQ ID NO: 16079 - RNA, 20 nt, Artificial Sequence
  Synthetic
accuugauaccaaccugccc

SEQ ID NO: 16080 - RNA, 20 nt, Artificial Sequence
  Synthetic
uugguggugaggcccugggc

SEQ ID NO: 16081 - RNA, 20 nt, Artificial Sequence
  Synthetic
ccuguggggcaaggugaacg

SEQ ID NO: 16082 - RNA, 20 nt, Artificial Sequence
  Synthetic
cauggugcaccugacuccug

SEQ ID NO: 16083 - RNA, 20 nt, Artificial Sequence
  Synthetic
ugcaccauggugucuguuug

SEQ ID NO: 16084 - RNA, 20 nt, Artificial Sequence
  Synthetic
uggugaggcccugggcaggu

SEQ ID NO: 16085 - RNA, 18 nt, Artificial Sequence
  Synthetic
aacggcagacuucuccac

SEQ ID NO: 16086 - RNA, 19 nt, Artificial Sequence
  Synthetic
uaacggcagacuucuccac

SEQ ID NO: 16087 - RNA, 20 nt, Artificial Sequence
  Synthetic
guaacggcagacuucuccac

SEQ ID NO: 16088 - RNA, 21 nt, Artificial Sequence
  Synthetic
aguaacggcagacuucuccac

SEQ ID NO: 16089 - RNA, 22 nt, Artificial Sequence
  Synthetic
caguaacggcagacuucuccac

SEQ ID NO: 16090 - RNA, 23 nt, Artificial Sequence
  Synthetic
gcaguaacggcagacuucuccac

SEQ ID NO: 16091 - RNA, 24 nt, Artificial Sequence
  Synthetic
ggcaguaacggcagacuucuccac

SEQ ID NO: 16092 - RNA, 18 nt, Artificial Sequence
  Synthetic
cuguggggcaaggugaac

SEQ ID NO: 16093 - RNA, 19 nt, Artificial Sequence
  Synthetic
ccuguggggcaaggugaac

SEQ ID NO: 16094 - RNA, 20 nt, Artificial Sequence
  Synthetic
cccuguggggcaaggugaac

SEQ ID NO: 16095 - RNA, 21 nt, Artificial Sequence
  Synthetic
gcccuguggggcaaggugaac

SEQ ID NO: 16096 - RNA, 22 nt, Artificial Sequence
  Synthetic
ugcccuguggggcaaggugaac

SEQ ID NO: 16097 - RNA, 23 nt, Artificial Sequence
  Synthetic
cugcccuguggggcaaggugaac

SEQ ID NO: 16098 - RNA, 24 nt, Artificial Sequence
  Synthetic
acugcccuguggggcaaggugaac

SEQ ID NO: 16099 - RNA, 18 nt, Artificial Sequence
  Synthetic
cacguucaccuugcccca

SEQ ID NO: 16100 - RNA, 19 nt, Artificial Sequence
  Synthetic
ccacguucaccuugcccca

SEQ ID NO: 16101 - RNA, 20 nt, Artificial Sequence
  Synthetic
uccacguucaccuugcccca

SEQ ID NO: 16102 - RNA, 21 nt, Artificial Sequence
  Synthetic
auccacguucaccuugcccca

SEQ ID NO: 16103 - RNA, 22 nt, Artificial Sequence
  Synthetic
cauccacguucaccuugcccca

SEQ ID NO: 16104 - RNA, 23 nt, Artificial Sequence
  Synthetic
ucauccacguucaccuugcccca

SEQ ID NO: 16105 - RNA, 24 nt, Artificial Sequence
  Synthetic
uucauccacguucaccuugcccca

SEQ ID NO: 16106 - RNA, 18 nt, Artificial Sequence
  Synthetic
uaacggcagacuucucca

SEQ ID NO: 16107 - RNA, 19 nt, Artificial Sequence
  Synthetic
guaacggcagacuucucca

SEQ ID NO: 16108 - RNA, 20 nt, Artificial Sequence
  Synthetic
aguaacggcagacuucucca

SEQ ID NO: 16109 - RNA, 21 nt, Artificial Sequence
  Synthetic
caguaacggcagacuucucca

SEQ ID NO: 16110 - RNA, 22 nt, Artificial Sequence
  Synthetic
gcaguaacggcagacuucucca

SEQ ID NO: 16111 - RNA, 23 nt, Artificial Sequence
  Synthetic
ggcaguaacggcagacuucucca

SEQ ID NO: 16112 - RNA, 24 nt, Artificial Sequence
  Synthetic
gggcaguaacggcagacuucucca

SEQ ID NO: 16113 - RNA, 18 nt, Artificial Sequence
  Synthetic
gucuguuugagguugcua

SEQ ID NO: 16114 - RNA, 19 nt, Artificial Sequence
  Synthetic
ugucuguuugagguugcua

SEQ ID NO: 16115 - RNA, 20 nt, Artificial Sequence
  Synthetic
gugucuguuugagguugcua

SEQ ID NO: 16116 - RNA, 21 nt, Artificial Sequence
  Synthetic
ggugucuguuugagguugcua

SEQ ID NO: 16117 - RNA, 22 nt, Artificial Sequence
  Synthetic
uggugucuguuugagguugcua

SEQ ID NO: 16118 - RNA, 23 nt, Artificial Sequence
  Synthetic
auggugucuguuugagguugcua

SEQ ID NO: 16119 - RNA, 24 nt, Artificial Sequence
  Synthetic
cauggugucuguuugagguugcua

SEQ ID NO: 16120 - RNA, 18 nt, Artificial Sequence
  Synthetic
ccuugauaccaaccugcc

SEQ ID NO: 16121 - RNA, 19 nt, Artificial Sequence
  Synthetic
accuugauaccaaccugcc

SEQ ID NO: 16122 - RNA, 20 nt, Artificial Sequence
  Synthetic
aaccuugauaccaaccugcc

SEQ ID NO: 16123 - RNA, 21 nt, Artificial Sequence
  Synthetic
uaaccuugauaccaaccugcc

SEQ ID NO: 16124 - RNA, 22 nt, Artificial Sequence
  Synthetic
guaaccuugauaccaaccugcc

SEQ ID NO: 16125 - RNA, 23 nt, Artificial Sequence
  Synthetic
uguaaccuugauaccaaccugcc

SEQ ID NO: 16126 - RNA, 24 nt, Artificial Sequence
  Synthetic
uuguaaccuugauaccaaccugcc

SEQ ID NO: 16127 - RNA, 18 nt, Artificial Sequence
  Synthetic
gugcaccauggugucugu

SEQ ID NO: 16128 - RNA, 19 nt, Artificial Sequence
  Synthetic
ggugcaccauggugucugu

SEQ ID NO: 16129 - RNA, 20 nt, Artificial Sequence
  Synthetic
aggugcaccauggugucugu

SEQ ID NO: 16130 - RNA, 21 nt, Artificial Sequence
  Synthetic
caggugcaccauggugucugu

SEQ ID NO: 16131 - RNA, 22 nt, Artificial Sequence
  Synthetic
ucaggugcaccauggugucugu

SEQ ID NO: 16132 - RNA, 23 nt, Artificial Sequence
  Synthetic
gucaggugcaccauggugucugu

SEQ ID NO: 16133 - RNA, 24 nt, Artificial Sequence
  Synthetic
agucaggugcaccauggugucugu

SEQ ID NO: 16134 - RNA, 18 nt, Artificial Sequence
  Synthetic
uagugaacacaguugugu

SEQ ID NO: 16135 - RNA, 19 nt, Artificial Sequence
  Synthetic
cuagugaacacaguugugu

SEQ ID NO: 16136 - RNA, 20 nt, Artificial Sequence
  Synthetic
gcuagugaacacaguugugu

SEQ ID NO: 16137 - RNA, 21 nt, Artificial Sequence
  Synthetic
ugcuagugaacacaguugugu

SEQ ID NO: 16138 - RNA, 22 nt, Artificial Sequence
  Synthetic
uugcuagugaacacaguugugu

SEQ ID NO: 16139 - RNA, 23 nt, Artificial Sequence
  Synthetic
guugcuagugaacacaguugugu

SEQ ID NO: 16140 - RNA, 24 nt, Artificial Sequence
  Synthetic
gguugcuagugaacacaguugugu

SEQ ID NO: 16141 - RNA, 18 nt, Artificial Sequence
  Synthetic
uaaggagaccaauagaaa

SEQ ID NO: 16142 - RNA, 19 nt, Artificial Sequence
  Synthetic
uuaaggagaccaauagaaa

SEQ ID NO: 16143 - RNA, 20 nt, Artificial Sequence
  Synthetic
uuuaaggagaccaauagaaa

SEQ ID NO: 16144 - RNA, 21 nt, Artificial Sequence
  Synthetic
guuuaaggagaccaauagaaa

SEQ ID NO: 16145 - RNA, 22 nt, Artificial Sequence
  Synthetic
gguuuaaggagaccaauagaaa

SEQ ID NO: 16146 - RNA, 23 nt, Artificial Sequence
  Synthetic
agguuuaaggagaccaauagaaa

SEQ ID NO: 16147 - RNA, 24 nt, Artificial Sequence
  Synthetic
cagguuuaaggagaccaauagaaa

SEQ ID NO: 16148 - RNA, 18 nt, Artificial Sequence
  Synthetic
cagguuuaaggagaccaa

SEQ ID NO: 16149 - RNA, 19 nt, Artificial Sequence
  Synthetic
acagguuuaaggagaccaa

SEQ ID NO: 16150 - RNA, 20 nt, Artificial Sequence
  Synthetic
gacagguuuaaggagaccaa

SEQ ID NO: 16151 - RNA, 21 nt, Artificial Sequence
  Synthetic
agacagguuuaaggagaccaa

SEQ ID NO: 16152 - RNA, 22 nt, Artificial Sequence
  Synthetic
aagacagguuuaaggagaccaa

SEQ ID NO: 16153 - RNA, 23 nt, Artificial Sequence
  Synthetic
caagacagguuuaaggagaccaa

SEQ ID NO: 16154 - RNA, 24 nt, Artificial Sequence
  Synthetic
acaagacagguuuaaggagaccaa

SEQ ID NO: 16155 - RNA, 18 nt, Artificial Sequence
  Synthetic
gguuacaagacagguuua

SEQ ID NO: 16156 - RNA, 19 nt, Artificial Sequence
  Synthetic
agguuacaagacagguuua

SEQ ID NO: 16157 - RNA, 20 nt, Artificial Sequence
  Synthetic
aagguuacaagacagguuua

SEQ ID NO: 16158 - RNA, 21 nt, Artificial Sequence
  Synthetic
caagguuacaagacagguuua

SEQ ID NO: 16159 - RNA, 22 nt, Artificial Sequence
  Synthetic
ucaagguuacaagacagguuua

SEQ ID NO: 16160 - RNA, 23 nt, Artificial Sequence
  Synthetic
aucaagguuacaagacagguuua

SEQ ID NO: 16161 - RNA, 24 nt, Artificial Sequence
  Synthetic
uaucaagguuacaagacagguuua

SEQ ID NO: 16162 - RNA, 18 nt, Artificial Sequence
  Synthetic
gaaguugguggugaggcc

SEQ ID NO: 16163 - RNA, 19 nt, Artificial Sequence
  Synthetic
ugaaguugguggugaggcc

SEQ ID NO: 16164 - RNA, 20 nt, Artificial Sequence
  Synthetic
augaaguugguggugaggcc

SEQ ID NO: 16165 - RNA, 21 nt, Artificial Sequence
  Synthetic
gaugaaguugguggugaggcc

SEQ ID NO: 16166 - RNA, 22 nt, Artificial Sequence
  Synthetic
ggaugaaguugguggugaggcc

SEQ ID NO: 16167 - RNA, 23 nt, Artificial Sequence
  Synthetic
uggaugaaguugguggugaggcc

SEQ ID NO: 16168 - RNA, 24 nt, Artificial Sequence
  Synthetic
guggaugaaguugguggugaggcc

SEQ ID NO: 16169 - RNA, 18 nt, Artificial Sequence
  Synthetic
acugcccuguggggcaag

SEQ ID NO: 16170 - RNA, 19 nt, Artificial Sequence
  Synthetic
uacugcccuguggggcaag

SEQ ID NO: 16171 - RNA, 20 nt, Artificial Sequence
  Synthetic
uuacugcccuguggggcaag

SEQ ID NO: 16172 - RNA, 21 nt, Artificial Sequence
  Synthetic
guuacugcccuguggggcaag

SEQ ID NO: 16173 - RNA, 22 nt, Artificial Sequence
  Synthetic
cguuacugcccuguggggcaag

SEQ ID NO: 16174 - RNA, 23 nt, Artificial Sequence
  Synthetic
ccguuacugcccuguggggcaag

SEQ ID NO: 16175 - RNA, 24 nt, Artificial Sequence
  Synthetic
gccguuacugcccuguggggcaag

SEQ ID NO: 16176 - RNA, 18 nt, Artificial Sequence
  Synthetic
ggagggcaggagccaggg

SEQ ID NO: 16177 - RNA, 19 nt, Artificial Sequence
  Synthetic
gggagggcaggagccaggg

SEQ ID NO: 16178 - RNA, 20 nt, Artificial Sequence
  Synthetic
agggagggcaggagccaggg

SEQ ID NO: 16179 - RNA, 21 nt, Artificial Sequence
  Synthetic
cagggagggcaggagccaggg

SEQ ID NO: 16180 - RNA, 22 nt, Artificial Sequence
  Synthetic
gcagggagggcaggagccaggg

SEQ ID NO: 16181 - RNA, 23 nt, Artificial Sequence
  Synthetic
agcagggagggcaggagccaggg

SEQ ID NO: 16182 - RNA, 24 nt, Artificial Sequence
  Synthetic
gagcagggagggcaggagccaggg

SEQ ID NO: 16183 - RNA, 18 nt, Artificial Sequence
  Synthetic
ugggcauaaaagucaggg

SEQ ID NO: 16184 - RNA, 19 nt, Artificial Sequence
  Synthetic
cugggcauaaaagucaggg

SEQ ID NO: 16185 - RNA, 20 nt, Artificial Sequence
  Synthetic
gcugggcauaaaagucaggg

SEQ ID NO: 16186 - RNA, 21 nt, Artificial Sequence
  Synthetic
ggcugggcauaaaagucaggg

SEQ ID NO: 16187 - RNA, 22 nt, Artificial Sequence
  Synthetic
gggcugggcauaaaagucaggg

SEQ ID NO: 16188 - RNA, 23 nt, Artificial Sequence
  Synthetic
agggcugggcauaaaagucaggg

SEQ ID NO: 16189 - RNA, 24 nt, Artificial Sequence
  Synthetic
cagggcugggcauaaaagucaggg

SEQ ID NO: 16190 - RNA, 18 nt, Artificial Sequence
  Synthetic
ggggcaaggugaacgugg

SEQ ID NO: 16191 - RNA, 19 nt, Artificial Sequence
  Synthetic
uggggcaaggugaacgugg

SEQ ID NO: 16192 - RNA, 20 nt, Artificial Sequence
  Synthetic
guggggcaaggugaacgugg

SEQ ID NO: 16193 - RNA, 21 nt, Artificial Sequence
  Synthetic
uguggggcaaggugaacgugg

SEQ ID NO: 16194 - RNA, 22 nt, Artificial Sequence
  Synthetic
cuguggggcaaggugaacgugg

SEQ ID NO: 16195 - RNA, 23 nt, Artificial Sequence
  Synthetic
ccuguggggcaaggugaacgugg

SEQ ID NO: 16196 - RNA, 24 nt, Artificial Sequence
  Synthetic
cccuguggggcaaggugaacgugg

SEQ ID NO: 16197 - RNA, 18 nt, Artificial Sequence
  Synthetic
ucugccguuacugcccug

SEQ ID NO: 16198 - RNA, 19 nt, Artificial Sequence
  Synthetic
gucugccguuacugcccug

SEQ ID NO: 16199 - RNA, 20 nt, Artificial Sequence
  Synthetic
agucugccguuacugcccug

SEQ ID NO: 16200 - RNA, 21 nt, Artificial Sequence
  Synthetic
aagucugccguuacugcccug

SEQ ID NO: 16201 - RNA, 22 nt, Artificial Sequence
  Synthetic
gaagucugccguuacugcccug

SEQ ID NO: 16202 - RNA, 23 nt, Artificial Sequence
  Synthetic
agaagucugccguuacugcccug

SEQ ID NO: 16203 - RNA, 24 nt, Artificial Sequence
  Synthetic
gagaagucugccguuacugcccug

SEQ ID NO: 16204 - RNA, 18 nt, Artificial Sequence
  Synthetic
uggugcaccugacuccug

SEQ ID NO: 16205 - RNA, 19 nt, Artificial Sequence
  Synthetic
auggugcaccugacuccug

SEQ ID NO: 16206 - RNA, 20 nt, Artificial Sequence
  Synthetic
cauggugcaccugacuccug

SEQ ID NO: 16207 - RNA, 21 nt, Artificial Sequence
  Synthetic
ccauggugcaccugacuccug

SEQ ID NO: 16208 - RNA, 22 nt, Artificial Sequence
  Synthetic
accauggugcaccugacuccug

SEQ ID NO: 16209 - RNA, 23 nt, Artificial Sequence
  Synthetic
caccauggugcaccugacuccug

SEQ ID NO: 16210 - RNA, 24 nt, Artificial Sequence
  Synthetic
acaccauggugcaccugacuccug

SEQ ID NO: 16211 - RNA, 18 nt, Artificial Sequence
  Synthetic
acguggaugaaguuggug

SEQ ID NO: 16212 - RNA, 19 nt, Artificial Sequence
  Synthetic
aacguggaugaaguuggug

SEQ ID NO: 16213 - RNA, 20 nt, Artificial Sequence
  Synthetic
gaacguggaugaaguuggug

SEQ ID NO: 16214 - RNA, 21 nt, Artificial Sequence
  Synthetic
ugaacguggaugaaguuggug

SEQ ID NO: 16215 - RNA, 22 nt, Artificial Sequence
  Synthetic
gugaacguggaugaaguuggug

SEQ ID NO: 16216 - RNA, 23 nt, Artificial Sequence
  Synthetic
ggugaacguggaugaaguuggug

SEQ ID NO: 16217 - RNA, 24 nt, Artificial Sequence
  Synthetic
aggugaacguggaugaaguuggug

SEQ ID NO: 16218 - RNA, 18 nt, Artificial Sequence
  Synthetic
gugcaccugacuccugug

SEQ ID NO: 16219 - RNA, 19 nt, Artificial Sequence
  Synthetic
ggugcaccugacuccugug

SEQ ID NO: 16220 - RNA, 20 nt, Artificial Sequence
  Synthetic
uggugcaccugacuccugug

SEQ ID NO: 16221 - RNA, 21 nt, Artificial Sequence
  Synthetic
auggugcaccugacuccugug

SEQ ID NO: 16222 - RNA, 22 nt, Artificial Sequence
  Synthetic
cauggugcaccugacuccugug

SEQ ID NO: 16223 - RNA, 23 nt, Artificial Sequence
  Synthetic
ccauggugcaccugacuccugug

SEQ ID NO: 16224 - RNA, 24 nt, Artificial Sequence
  Synthetic
accauggugcaccugacuccugug

SEQ ID NO: 16225 - RNA, 18 nt, Artificial Sequence
  Synthetic
gucugccguuacugcccu

SEQ ID NO: 16226 - RNA, 19 nt, Artificial Sequence
  Synthetic
agucugccguuacugcccu

SEQ ID NO: 16227 - RNA, 20 nt, Artificial Sequence
  Synthetic
aagucugccguuacugcccu

SEQ ID NO: 16228 - RNA, 21 nt, Artificial Sequence
  Synthetic
gaagucugccguuacugcccu

SEQ ID NO: 16229 - RNA, 22 nt, Artificial Sequence
  Synthetic
agaagucugccguuacugcccu

SEQ ID NO: 16230 - RNA, 23 nt, Artificial Sequence
  Synthetic
gagaagucugccguuacugcccu

SEQ ID NO: 16231 - RNA, 24 nt, Artificial Sequence
  Synthetic
ggagaagucugccguuacugcccu

SEQ ID NO: 16232 - RNA, 18 nt, Artificial Sequence
  Synthetic
auggugcaccugacuccu

SEQ ID NO: 16233 - RNA, 19 nt, Artificial Sequence
  Synthetic
cauggugcaccugacuccu

SEQ ID NO: 16234 - RNA, 20 nt, Artificial Sequence
  Synthetic
ccauggugcaccugacuccu

SEQ ID NO: 16235 - RNA, 21 nt, Artificial Sequence
  Synthetic
accauggugcaccugacuccu

SEQ ID NO: 16236 - RNA, 22 nt, Artificial Sequence
  Synthetic
caccauggugcaccugacuccu

SEQ ID NO: 16237 - RNA, 23 nt, Artificial Sequence
  Synthetic
acaccauggugcaccugacuccu

SEQ ID NO: 16238 - RNA, 24 nt, Artificial Sequence
  Synthetic
gacaccauggugcaccugacuccu

SEQ ID NO: 16239 - RNA, 18 nt, Artificial Sequence
  Synthetic
agggcugggcauaaaagu

SEQ ID NO: 16240 - RNA, 19 nt, Artificial Sequence
  Synthetic
cagggcugggcauaaaagu

SEQ ID NO: 16241 - RNA, 20 nt, Artificial Sequence
  Synthetic
ccagggcugggcauaaaagu

SEQ ID NO: 16242 - RNA, 21 nt, Artificial Sequence
  Synthetic
gccagggcugggcauaaaagu

SEQ ID NO: 16243 - RNA, 22 nt, Artificial Sequence
  Synthetic
agccagggcugggcauaaaagu

SEQ ID NO: 16244 - RNA, 23 nt, Artificial Sequence
  Synthetic
gagccagggcugggcauaaaagu

SEQ ID NO: 16245 - RNA, 24 nt, Artificial Sequence
  Synthetic
ggagccagggcugggcauaaaagu

SEQ ID NO: 16246 - RNA, 18 nt, Artificial Sequence
  Synthetic
agguuacaagacagguuu

SEQ ID NO: 16247 - RNA, 19 nt, Artificial Sequence
  Synthetic
aagguuacaagacagguuu

SEQ ID NO: 16248 - RNA, 20 nt, Artificial Sequence
  Synthetic
caagguuacaagacagguuu

SEQ ID NO: 16249 - RNA, 21 nt, Artificial Sequence
  Synthetic
ucaagguuacaagacagguuu

SEQ ID NO: 16250 - RNA, 22 nt, Artificial Sequence
  Synthetic
aucaagguuacaagacagguuu

SEQ ID NO: 16251 - RNA, 23 nt, Artificial Sequence
  Synthetic
uaucaagguuacaagacagguuu

SEQ ID NO: 16252 - RNA, 24 nt, Artificial Sequence
  Synthetic
guaucaagguuacaagacagguuu

SEQ ID NO: 16253 - RNA, 17 nt, Artificial Sequence
  Synthetic
agccaucuauugcuuac

SEQ ID NO: 16254 - RNA, 17 nt, Artificial Sequence
  Synthetic
gucagggcagagccauc

SEQ ID NO: 16255 - RNA, 20 nt, Artificial Sequence
  Synthetic
cagagccaucuauugcuuac

SEQ ID NO: 16256 - RNA, 20 nt, Artificial Sequence
  Synthetic
aaagucagggcagagccauc

SEQ ID NO: 16257 - DNA, 1072 bp, Artificial Sequence
  Synthetic
ataggaacttgaatcaaggaaatgattttaaaacgcagtattcttagtggactagaggaaaaaaataatctgagccaagtagaagaccttttcccctcctacccctactttctaagtcacagaggctttttgttcccccagacactcttgcagattagtccaggcagaaacagttagatgtccccagttaacctcctatttgacaccactgattaccccattgatagtcacactttgggttgtaagtgactttttatttatttgtatttttgactgcattaagaggtctctagttttttatctcttgtttcccaaaacctaataagtaactaatgcacagagcacattgatttgtatttattctatttttagacataatttattagcatgcatgagcaaattaagaaaaacaacaacaaatgaatgcatatatatgtatatgtatgtgtgtatatatacacacatatatatatatattttttcttttcttaccagaaggttttaatccaaataaggagaagatatgcttagaaccgaggtagagttttcatccattctgtcctgtaagtattttgcatattctggagacgcaggaagagatccatctacatatcccaaagctgaattatggtagacaaaactcttccacttttagtgcatcaacttcttatttgtgtaataagaaaattgggaaaacgatcttcaatatgcttaccaagctgtgattccaaatattacgtaaatacacttgcaaaggaggatgtttttagtagcaatttgtactgatggtatggggccaagagatatatcttagagggagggctgagggtttgaagtccaactcctaagccagtgccagaagagccaaggacaggtacggctgtcatcacttagacctcaccctgtggagccacaccctagggttggccaatctactcccaggagcagggagggcaggagccagggctgggcataaaagtcagggcagagccatctattgcttacatttgcttctgacacaactgtgttcactagcaacctcaaacagacaccatggtgcatctgactcctg

SEQ ID NO: 16258 - DNA, 1128 bp, Artificial Sequence
  Synthetic
ggagaagtctgccgttactgccctgtggggcaaggtgaacgtggatgaagttggtggtgaggccctgggcaggttggtatcaaggttacaagacaggtttaaggagaccaatagaaactgggcatgtggagacagagaagactcttgggtttctgataggcactgactctctctgcctattggtctattttcccacccttaggctgctggtggtctacccttggacccagaggttctttgagtcctttggggatctgtccactcctgatgctgttatgggcaaccctaaggtgaaggctcatggcaagaaagtgctcggtgcctttagtgatggcctggctcacctggacaacctcaagggcacctttgccacactgagtgagctgcactgtgacaagctgcacgtggatcctgagaacttcagggtgagtctatgggacgcttgatgttttctttccccttcttttctatggttaagttcatgtcataggaaggggataagtaacagggtacagtttagaatgggaaacagacgaatgattgcatcagtgtggaagtctcaggatcgttttagtttcttttatttgctgttcataacaattgttttcttttgtttaattcttgctttctttttttttcttctccgcaatttttactattatacttaatgccttaacattgtgtataacaaaaggaaatatctctgagatacattaagtaacttaaaaaaaaactttacacagtctgcctagtacattactatttggaatatatgtgtgcttatttgcatattcataatctccctactttattttcttttatttttaattgatacataatcattatacatatttatgggttaaagtgtaatgttttaatatgtgtacacatattgaccaaatcagggtaattttgcatttgtaattttaaaaaatgctttcttcttttaatatacttttttgtttatcttatttctaatactttccctaatctctttctttcagggcaataatgatacaatgtatcatgcctctttgcaccattctaaagaataacagtgataatttctgggttaaggcaatagcaatatctctgcatataaatatttctgcatataaattgtaactg

SEQ ID NO: 16259 - DNA, 2201 bp, Artificial Sequence
  Synthetic
ataggaacttgaatcaaggaaatgattttaaaacgcagtattcttagtggactagaggaaaaaaataatctgagccaagtagaagaccttttcccctcctacccctactttctaagtcacagaggctttttgttcccccagacactcttgcagattagtccaggcagaaacagttagatgtccccagttaacctcctatttgacaccactgattaccccattgatagtcacactttgggttgtaagtgactttttatttatttgtatttttgactgcattaagaggtctctagttttttatctcttgtttcccaaaacctaataagtaactaatgcacagagcacattgatttgtatttattctatttttagacataatttattagcatgcatgagcaaattaagaaaaacaacaacaaatgaatgcatatatatgtatatgtatgtgtgtatatatacacacatatatatatatattttttcttttcttaccagaaggttttaatccaaataaggagaagatatgcttagaaccgaggtagagttttcatccattctgtcctgtaagtattttgcatattctggagacgcaggaagagatccatctacatatcccaaagctgaattatggtagacaaaactcttccacttttagtgcatcaacttcttatttgtgtaataagaaaattgggaaaacgatcttcaatatgcttaccaagctgtgattccaaatattacgtaaatacacttgcaaaggaggatgtttttagtagcaatttgtactgatggtatggggccaagagatatatcttagagggagggctgagggtttgaagtccaactcctaagccagtgccagaagagccaaggacaggtacggctgtcatcacttagacctcaccctgtggagccacaccctagggttggccaatctactcccaggagcagggagggcaggagccagggctgggcataaaagtcagggcagagccatctattgcttacatttgcttctgacacaactgtgttcactagcaacctcaaacagacaccatggtgcatctgactcctgaggagaagtctgccgttactgccctgtggggcaaggtgaacgtggatgaagttggtggtgaggccctgggcaggttggtatcaaggttacaagacaggtttaaggagaccaatagaaactgggcatgtggagacagagaagactcttgggtttctgataggcactgactctctctgcctattggtctattttcccacccttaggctgctggtggtctacccttggacccagaggttctttgagtcctttggggatctgtccactcctgatgctgttatgggcaaccctaaggtgaaggctcatggcaagaaagtgctcggtgcctttagtgatggcctggctcacctggacaacctcaagggcacctttgccacactgagtgagctgcactgtgacaagctgcacgtggatcctgagaacttcagggtgagtctatgggacgcttgatgttttctttccccttcttttctatggttaagttcatgtcataggaaggggataagtaacagggtacagtttagaatgggaaacagacgaatgattgcatcagtgtggaagtctcaggatcgttttagtttcttttatttgctgttcataacaattgttttcttttgtttaattcttgctttctttttttttcttctccgcaatttttactattatacttaatgccttaacattgtgtataacaaaaggaaatatctctgagatacattaagtaacttaaaaaaaaactttacacagtctgcctagtacattactatttggaatatatgtgtgcttatttgcatattcataatctccctactttattttcttttatttttaattgatacataatcattatacatatttatgggttaaagtgtaatgttttaatatgtgtacacatattgaccaaatcagggtaattttgcatttgtaattttaaaaaatgctttcttcttttaatatacttttttgtttatcttatttctaatactttccctaatctctttctttcagggcaataatgatacaatgtatcatgcctctttgcaccattctaaagaataacagtgataatttctgggttaaggcaatagcaatatctctgcatataaatatttctgcatataaattgtaactg

SEQ ID NO: 16260 - DNA, 103 bp, Artificial Sequence
  Synthetic
actgtgttcactagcaacctcaaacagacaccatggtgcatctgactcctggggagaagtctgccgttactgccctgtggggcaaggtgaacgtggatgaagt

SEQ ID NO: 16261-16296 - skipped (36 entries)

SEQ ID NO: 16297 - DNA, 59 bp, Artificial Sequence
  Synthetic
ctcctgaggagaagtctgccgttactgccctgtggggcaagggtgaacgtggatgaagt

SEQ ID NO: 16298 - DNA, 58 bp, Artificial Sequence
  Synthetic
ctcctgaggagaagtctgccgttactgccctgtggggcaagatgaacgtggatgaagt

SEQ ID NO: 16299 - DNA, 20 bp, Artificial Sequence
  Synthetic
gtaacggcagacttctccac

SEQ ID NO: 16300 - DNA, 3159 bp, Artificial Sequence
  Synthetic
atgaagcggaactacatcctgggcctggacatcggcatcaccagcgtgggctacggcatcatcgactacgagacacgggacgtgatcgatgccggcgtgcggctgttcaaagaggccaacgtggaaaacaacgagggcaggcggagcaagagaggcgccagaaggctgaagcggcggaggcggcatagaatccagagagtgaagaagctgctgttcgactacaacctgctgaccgaccacagcgagctgagcggcatcaacccctacgaggccagagtgaagggcctgagccagaagctgagcgaggaagagttctctgccgccctgctgcacctggccaagagaagaggcgtgcacaacgtgaacgaggtggaagaggacaccggcaacgagctgtccaccaaagagcagatcagccggaacagcaaggccctggaagagaaatacgtggccgaactgcagctggaacggctgaagaaagacggcgaagtgcggggcagcatcaacagattcaagaccagcgactacgtgaaagaagccaaacagctgctgaaggtgcagaaggcctaccaccagctggaccagagcttcatcgacacctacatcgacctgctggaaacccggcggacctactatgagggacctggcgagggcagccccttcggctggaaggacatcaaagaatggtacgagatgctgatgggccactgcacctacttccccgaggaactgcggagcgtgaagtacgcctacaacgccgacctgtacaacgccctgaacgacctgaacaatctcgtgatcaccagggacgagaacgagaagctggaatattacgagaagttccagatcatcgagaacgtgttcaagcagaagaagaagcccaccctgaagcagatcgccaaagaaatcctcgtgaacgaagaggatattaagggctacagagtgaccagcaccggcaagcccgagttcaccaacctgaaggtgtaccacgacatcaaggacattaccgcccggaaagagattattgagaacgccgagctgctggatcagattgccaagatcctgaccatctaccagagcagcgaggacatccaggaagaactgaccaatctgaactccgagctgacccaggaagagatcgagcagatctctaatctgaagggctataccggcacccacaacctgagcctgaaggccatcaacctgatcctggacgagctgtggcacaccaacgacaaccagatcgctatcttcaaccggctgaagctggtgcccaagaaggtggacctgtcccagcagaaagagatccccaccaccctggtggacgacttcatcctgagccccgtcgtgaagagaagcttcatccagagcatcaaagtgatcaacgccatcatcaagaagtacggcctgcccaacgacatcattatcgagctggcccgcgagaagaactccaaggacgcccagaaaatgatcaacgagatgcagaagcggaaccggcagaccaacgagcggatcgaggaaatcatccggaccaccggcaaagagaacgccaagtacctgatcgagaagatcaagctgcacgacatgcaggaaggcaagtgcctgtacagcctggaagccatccctctggaagatctgctgaacaaccccttcaactatgaggtggaccacatcatccccagaagcgtgtccttcgacaacagcttcaacaacaaggtgctcgtgaagcaggaagaaaacagcaagaagggcaaccggaccccattccagtacctgagcagcagcgacagcaagatcagctacgaaaccttcaagaagcacatcctgaatctggccaagggcaagggcagaatcagcaagaccaagaaagagtatctgctggaagaacgggacatcaacaggttctccgtgcagaaagacttcatcaaccggaacctggtggataccagatacgccaccagaggcctgatgaacctgctgcggagctacttcagagtgaacaacctggacgtgaaagtgaagtccatcaatggcggcttcaccagctttctgcggcggaagtggaagtttaagaaagagcggaacaaggggtacaagcaccacgccgaggacgccctgatcattgccaacgccgatttcatcttcaaagagtggaagaaactggacaaggccaaaaaagtgatggaaaaccagatgttcgaggaaaagcaggccgagagcatgcccgagatcgaaaccgagcaggagtacaaagagatcttcatcaccccccaccagatcaagcacattaaggacttcaaggactacaagtacagccaccgggtggacaagaagcctaatagagagctgattaacgacaccctgtactccacccggaaggacgacaagggcaacaccctgatcgtgaacaatctgaacggcctgtacgacaaggacaatgacaagctgaaaaagctgatcaacaagagccccgaaaagctgctgatgtaccaccacgacccccagacctaccagaaactgaagctgattatggaacagtacggcgacgagaagaatcccctgtacaagtactacgaggaaaccgggaactacctgaccaagtactccaaaaaggacaacggccccgtgatcaagaagattaagtattacggcaacaaactgaacgcccatctggacatcaccgacgactaccccaacagcagaaacaaggtcgtgaagctgtccctgaagccctacagattcgacgtgtacctggacaatggcgtgtacaagttcgtgaccgtgaagaatctggatgtgatcaaaaaagaaaactactacgaagtgaatagcaagtgctatgaggaagctaagaagctgaagaagatcagcaaccaggccgagtttatcgcctccttctacaacaacgatctgatcaagatcaacggcgagctgtatagagtgatcggcgtgaacaacgacctgctgaaccggatcgaagtgaacatgatcgacatcacctaccgcgagtacctggaaaacatgaacgacaagaggccccccaggatcattaagacaatcgcctccaagacccagagcattaagaagtacagcacagacattctgggcaacctgtatgaagtgaaatctaagaagcaccctcagatcatcaaaaagggc

SEQ ID NO: 16301 - DNA, 3159 bp, Artificial Sequence
  Synthetic
atgaagcgcaactacatcctcggactggacatcggcattacctccgtgggatacggcatcatcgattacgaaactagggatgtgatcgacgctggagtcaggctgttcaaagaggcgaacgtggagaacaacgaggggcggcgctcaaagaggggggcccgccggctgaagcgccgccgcagacatagaatccagcgcgtgaagaagctgctgttcgactacaaccttctgaccgaccactccgaactttccggcatcaacccatatgaggctagagtgaagggattgtcccaaaagctgtccgaggaagagttctccgccgcgttgctccacctcgccaagcgcaggggagtgcacaatgtgaacgaagtggaagaagataccggaaacgagctgtccaccaaggagcagatcagccggaactccaaggccctggaagagaaatacgtggcggaactgcaactggagcggctgaagaaagacggagaagtgcgcggctcgatcaaccgcttcaagacctcggactacgtgaaggaggccaagcagctcctgaaagtgcaaaaggcctatcaccaacttgaccagtcctttatcgatacctacatcgatctgctcgagactcggcggacttactacgagggtccaggggagggctccccatttggttggaaggatattaaggagtggtacgaaatgctgatgggacactgcacatacttccctgaggagctgcggagcgtgaaatacgcatacaacgcagacctgtacaacgcgctgaacgacctgaacaatctcgtgatcacccgggacgagaacgaaaagctcgagtattacgaaaagttccagattattgagaacgtgttcaaacagaagaagaagccgacactgaagcagattgccaaggaaatcctcgtgaacgaagaggacatcaagggctatcgagtgacctcaacgggaaagccggagttcaccaatctgaaggtctaccacgacatcaaagacattaccgcccggaaggagatcattgagaacgcggagctgttggaccagattgcgaagattctgaccatctaccaatcctccgaggatattcaggaagaactcaccaacctcaacagcgaactgacccaggaggagatagagcaaatctccaacctgaagggctacaccggaactcataacctgagcctgaaggccatcaacttgatcctggacgagctgtggcacaccaacgataaccagatcgctattttcaatcggctgaagctggtccccaagaaagtggacctctcacaacaaaaggagatccctactacccttgtggacgatttcattctgtcccccgtggtcaagagaagcttcatacagtcaatcaaagtgatcaatgccattatcaagaaatacggtctgcccaacgacattatcattgagctcgcccgcgagaagaactcgaaggacgcccagaagatgattaacgaaatgcagaagaggaaccgacagactaacgaacggatcgaagaaatcatccggaccaccgggaaggaaaacgcgaagtacctgatcgaaaagatcaagctccatgacatgcaggaaggaaagtgtctgtactcgctggaggccattccgctggaggacttgctgaacaacccttttaactacgaagtggatcatatcattccgaggagcgtgtcattcgacaattccttcaacaacaaggtcctcgtgaagcaggaggaaaactcgaagaagggaaaccgcacgccgttccagtacctgagcagcagcgactccaagatttcctacgaaaccttcaagaagcacatcctcaacctggcaaaggggaagggtcgcatctccaagaccaagaaggaatatctgctggaagaaagagacatcaacagattctccgtgcaaaaggacttcatcaaccgcaacctcgtggatactagatacgctactcggggtctgatgaacctcctgagaagctactttagagtgaacaatctggacgtgaaggtcaagtcgattaacggaggtttcacctccttcctgcggcgcaagtggaagttcaagaaggaacggaacaagggctacaagcaccacgccgaggacgccctgatcattgccaacgccgacttcatcttcaaagaatggaagaaacttgacaaggctaagaaggtcatggaaaaccagatgttcgaagaaaagcaggccgagtctatgcctgaaatcgagactgaacaggagtacaaggaaatctttattacgccacaccagatcaaacacatcaaggatttcaaggattacaagtactcacatcgcgtggacaaaaagccgaacagggaactgatcaacgacaccctctactccacccggaaggatgacaaagggaataccctcatcgtcaacaaccttaacggcctgtacgacaaggacaacgataagctgaagaagctcattaacaagtcgcccgaaaagttgctgatgtaccaccacgaccctcagacttaccagaagctcaagctgatcatggagcagtatggggacgagaaaaacccgttgtacaagtactacgaagaaactgggaattatctgactaagtactccaagaaagataacggccccgtgattaagaagattaagtactacggcaacaagctgaacgcccatctggacatcaccgatgactaccctaattcccgcaacaaggtcgtcaagctgagcctcaagccctaccggtttgatgtgtaccttgacaatggagtgtacaagttcgtgactgtgaagaaccttgacgtgatcaagaaggagaactactacgaagtcaactccaagtgctacgaggaagcaaagaagttgaagaagatctcgaaccaggccgagttcattgcctccttctataacaacgacctgattaagatcaacggcgaactgtaccgcgtcattggcgtgaacaacgatctcctgaaccgcatcgaagtgaacatgatcgacatcacttaccgggaatacctggagaatatgaacgacaagcgcccgccccggatcattaagactatcgcctcaaagacccagtcgatcaagaagtacagcaccgacatcctgggcaacctgtacgaggtcaaatcgaagaagcacccccagatcatcaagaaggga

SEQ ID NO: 16302 - DNA, 3159 bp, Artificial Sequence
  Synthetic
atgaaaaggaactacattctggggctggccatcgggattacaagcgtggggtatgggattattgactatgaaacaagggacgtgatcgacgcaggcgtcagactgttcaaggaggccaacgtggaaaacaatgagggacggagaagcaagaggggagccaggcgcctgaaacgacggagaaggcacagaatccagagggtgaagaaactgctgttcgattacaacctgctgaccgaccattctgagctgagtggaattaatccttatgaagccagggtgaaaggcctgagtcagaagctgtcagaggaagagttttccgcagctctgctgcacctggctaagcgccgaggagtgcataacgtcaatgaggtggaagaggacaccggcaacgagctgtctacaaaggaacagatctcacgcaatagcaaagctctggaagagaagtatgtcgcagagctgcagctggaacggctgaagaaagatggcgaggtgagagggtcaattaataggttcaagacaagcgactacgtcaaagaagccaagcagctgctgaaagtgcagaaggcttaccaccagctggatcagagcttcatcgatacttatatcgacctgctggagactcggagaacctactatgagggaccaggagaagggagccccttcggatggaaagacatcaaggaatggtacgagatgctgatgggacattgcacctattttccagaagagctgagaagcgtcaagtacgcttataacgcagatctgtacaacgccctgaatgacctgaacaacctggtcatcaccagggatgaaaacgagaaactggaatactatgagaagttccagatcatcgaaaacgtgtttaagcagaagaaaaagcctacactgaaacagattgctaaggagatcctggtcaacgaagaggacatcaagggctaccgggtgacaagcactggaaaaccagagttcaccaatctgaaagtgtatcacgatattaaggacatcacagcacggaaagaaatcattgagaacgccgaactgctggatcagattgctaagatcctgactatctaccagagctccgaggacatccaggaagagctgactaacctgaacagcgagctgacccaggaagagatcgaacagattagtaatctgaaggggtacaccggaacacacaacctgtccctgaaagctatcaatctgattctggatgagctgtggcatacaaacgacaatcagattgcaatctttaaccggctgaagctggtcccaaaaaaggtggacctgagtcagcagaaagagatcccaaccacactggtggacgatttcattctgtcacccgtggtcaagcggagcttcatccagagcatcaaagtgatcaacgccatcatcaagaagtacggcctgcccaatgatatcattatcgagctggctagggagaagaacagcaaggacgcacagaagatgatcaatgagatgcagaaacgaaaccggcagaccaatgaacgcattgaagagattatccgaactaccgggaaagagaacgcaaagtacctgattgaaaaaatcaagctgcacgatatgcaggagggaaagtgtctgtattctctggaggccatccccctggaggacctgctgaacaatccattcaactacgaggtcgatcatattatccccagaagcgtgtccttcgacaattcctttaacaacaaggtgctggtcaagcaggaagagaactctaaaaagggcaataggactcctttccagtacctgtctagttcagattccaagatctcttacgaaacctttaaaaagcacattctgaatctggccaaaggaaagggccgcatcagcaagaccaaaaaggagtacctgctggaagagcgggacatcaacagattctccgtccagaaggattttattaaccggaatctggtggacacaagatacgctactcgcggcctgatgaatctgctgcgatcctatttccgggtgaacaatctggatgtgaaagtcaagtccatcaacggcgggttcacatcttttctgaggcgcaaatggaagtttaaaaaggagcgcaacaaagggtacaagcaccatgccgaagatgctctgattatcgcaaatgccgacttcatctttaaggagtggaaaaagctggacaaagccaagaaagtgatggagaaccagatgttcgaagagaagcaggccgaatctatgcccgaaatcgagacagaacaggagtacaaggagattttcatcactcctcaccagatcaagcatatcaaggatttcaaggactacaagtactctcaccgggtggataaaaagcccaacagagagctgatcaatgacaccctgtatagtacaagaaaagacgataaggggaataccctgattgtgaacaatctgaacggactgtacgacaaagataatgacaagctgaaaaagctgatcaacaaaagtcccgagaagctgctgatgtaccaccatgatcctcagacatatcagaaactgaagctgattatggagcagtacggcgacgagaagaacccactgtataagtactatgaagagactgggaactacctgaccaagtatagcaaaaaggataatggccccgtgatcaagaagatcaagtactatgggaacaagctgaatgcccatctggacatcacagacgattaccctaacagtcgcaacaaggtggtcaagctgtcactgaagccatacagattcgatgtctatctggacaacggcgtgtataaatttgtgactgtcaagaatctggatgtcatcaaaaaggagaactactatgaagtgaatagcaagtgctacgaagaggctaaaaagctgaaaaagattagcaaccaggcagagttcatcgcctccttttacaacaacgacctgattaagatcaatggcgaactgtatagggtcatcggggtgaacaatgatctgctgaaccgcattgaagtgaatatgattgacatcacttaccgagagtatctggaaaacatgaatgataagcgcccccctcgaattatcaaaacaattgcctctaagactcagagtatcaaaaagtactcaaccgacattctgggaaacctgtatgaggtgaagagcaaaaagcaccctcagattatcaaaaagggc

SEQ ID NO: 16303 - DNA, 3159 bp, Artificial Sequence
  Synthetic
atgaaaaggaactacattctggggctggacatcgggattacaagcgtggggtatgggattattgactatgaaacaagggacgtgatcgacgcaggcgtcagactgttcaaggaggccaacgtggaaaacaatgagggacggagaagcaagaggggagccaggcgcctgaaacgacggagaaggcacagaatccagagggtgaagaaactgctgttcgattacaacctgctgaccgaccattctgagctgagtggaattaatccttatgaagccagggtgaaaggcctgagtcagaagctgtcagaggaagagttttccgcagctctgctgcacctggctaagcgccgaggagtgcataacgtcaatgaggtggaagaggacaccggcaacgagctgtctacaaaggaacagatctcacgcaatagcaaagctctggaagagaagtatgtcgcagagctgcagctggaacggctgaagaaagatggcgaggtgagagggtcaattaataggttcaagacaagcgactacgtcaaagaagccaagcagctgctgaaagtgcagaaggcttaccaccagctggatcagagcttcatcgatacttatatcgacctgctggagactcggagaacctactatgagggaccaggagaagggagccccttcggatggaaagacatcaaggaatggtacgagatgctgatgggacattgcacctattttccagaagagctgagaagcgtcaagtacgcttataacgcagatctgtacaacgccctgaatgacctgaacaacctggtcatcaccagggatgaaaacgagaaactggaatactatgagaagttccagatcatcgaaaacgtgtttaagcagaagaaaaagcctacactgaaacagattgctaaggagatcctggtcaacgaagaggacatcaagggctaccgggtgacaagcactggaaaaccagagttcaccaatctgaaagtgtatcacgatattaaggacatcacagcacggaaagaaatcattgagaacgccgaactgctggatcagattgctaagatcctgactatctaccagagctccgaggacatccaggaagagctgactaacctgaacagcgagctgacccaggaagagatcgaacagattagtaatctgaaggggtacaccggaacacacaacctgtccctgaaagctatcaatctgattctggatgagctgtggcatacaaacgacaatcagattgcaatctttaaccggctgaagctggtcccaaaaaaggtggacctgagtcagcagaaagagatcccaaccacactggtggacgatttcattctgtcacccgtggtcaagcggagcttcatccagagcatcaaagtgatcaacgccatcatcaagaagtacggcctgcccaatgatatcattatcgagctggctagggagaagaacagcaaggacgcacagaagatgatcaatgagatgcagaaacgaaaccggcagaccaatgaacgcattgaagagattatccgaactaccgggaaagagaacgcaaagtacctgattgaaaaaatcaagctgcacgatatgcaggagggaaagtgtctgtattctctggaggccatccccctggaggacctgctgaacaatccattcaactacgaggtcgatcatattatccccagaagcgtgtccttcgacaattcctttaacaacaaggtgctggtcaagcaggaagaggcctctaaaaagggcaataggactcctttccagtacctgtctagttcagattccaagatctcttacgaaacctttaaaaagcacattctgaatctggccaaaggaaagggccgcatcagcaagaccaaaaaggagtacctgctggaagagcgggacatcaacagattctccgtccagaaggattttattaaccggaatctggtggacacaagatacgctactcgcggcctgatgaatctgctgcgatcctatttccgggtgaacaatctggatgtgaaagtcaagtccatcaacggcgggttcacatcttttctgaggcgcaaatggaagtttaaaaaggagcgcaacaaagggtacaagcaccatgccgaagatgctctgattatcgcaaatgccgacttcatctttaaggagtggaaaaagctggacaaagccaagaaagtgatggagaaccagatgttcgaagagaagcaggccgaatctatgcccgaaatcgagacagaacaggagtacaaggagattttcatcactcctcaccagatcaagcatatcaaggatttcaaggactacaagtactctcaccgggtggataaaaagcccaacagagagctgatcaatgacaccctgtatagtacaagaaaagacgataaggggaataccctgattgtgaacaatctgaacggactgtacgacaaagataatgacaagctgaaaaagctgatcaacaaaagtcccgagaagctgctgatgtaccaccatgatcctcagacatatcagaaactgaagctgattatggagcagtacggcgacgagaagaacccactgtataagtactatgaagagactgggaactacctgaccaagtatagcaaaaaggataatggccccgtgatcaagaagatcaagtactatgggaacaagctgaatgcccatctggacatcacagacgattaccctaacagtcgcaacaaggtggtcaagctgtcactgaagccatacagattcgatgtctatctggacaacggcgtgtataaatttgtgactgtcaagaatctggatgtcatcaaaaaggagaactactatgaagtgaatagcaagtgctacgaagaggctaaaaagctgaaaaagattagcaaccaggcagagttcatcgcctccttttacaacaacgacctgattaagatcaatggcgaactgtatagggtcatcggggtgaacaatgatctgctgaaccgcattgaagtgaatatgattgacatcacttaccgagagtatctggaaaacatgaatgataagcgcccccctcgaattatcaaaacaattgcctctaagactcagagtatcaaaaagtactcaaccgacattctgggaaacctgtatgaggtgaagagcaaaaagcaccctcagattatcaaaaagggc

SEQ ID NO: 16304 - protein, 3418 aa, Homo sapiens [sequence omitted]

SEQ ID NO: 16305 - protein, 1863 aa, Homo sapiens
MDLSALRVEEVQNVINAMQKILECPICLELIKEPVSTKCDHIFCKFCMLKLLNQKKGPSQCPLCKNDITKRSLQESTRFSQLVEELLKIICAFQLDTGLEYANSYNFAKKENNSPEHLKDEVSIIQSMGYRNRAKRLLQSEPENPSLQETSLSVQLSNLGTVRTLRTKQRIQPQKTSVYIELGSDSSEDTVNKATYCSVGDQELLQITPQGTRDEISLDSAKKAACEFSETDVTNTEHHQPSNNDLNTTEKRAAERHPEKYQGSSVSNLHVEPCGTNTHASSLQHENSSLLLTKDRMNVEKAEFCNKSKQPGLARSQHNRWAGSKETCNDRRTPSTEKKVDLNADPLCERKEWNKQKLPCSENPRDTEDVPWITLNSSIQKVNEWFSRSDELLGSDDSHDGESESNAKVADVLDVLNEVDEYSGSSEKIDLLASDPHEALICKSERVHSKSVESNIEDKIFGKTYRKKASLPNLSHVTENLIIGAFVTEPQIIQERPLTNKLKRKRRPTSGLHPEDFIKKADLAVQKTPEMINQGTNQTEQNGQVMNITNSGHENKTKGDSIQNEKNPNPIESLEKESAFKTKAEPISSSISNMELELNIHNSKAPKKNRLRRKSSTRHIHALELVVSRNLSPPNCTELQIDSCSSSEEIKKKKYNQMPVRHSRNLQLMEGKEPATGAKKSNKPNEQTSKRHDSDTFPELKLTNAPGSFTKCSNTSELKEFVNPSLPREEKEEKLETVKVSNNAEDPKDLMLSGERVLQTERSVESSSISLVPGTDYGTQESISLLEVSTLGKAKTEPNKCVSQCAAFENPKGLIHGCSKDNRNDTEGFKYPLGHEVNHSRETSIEMEESELDAQYLQNTFKVSKRQSFAPFSNPGNAEEECATFSAHSGSLKKQSPKVTFECEQKEENQGKNESNIKPVQTVNITAGFPVVGQKDKPVDNAKCSIKGGSRFCLSSQFRGNETGLITPNKHGLLQNPYRIPPLFPIKSFVKTKCKKNLLEENFEEHSMSPEREMGNENIPSTVSTISRNNIRENVFKEASSSNINEVGSSTNEVGSSINEIGSSDENIQAELGRNRGPKLNAMLRLGVLQPEVYKQSLPGSNCKHPEIKKQEYEEVVQTVNTDFSPYLISDNLEQPMGSSHASQVCSETPDDLLDDGEIKEDTSFAENDIKESSAVFSKSVQKGELSRSPSPFTHTHLAQGYRRGAKKLESSEENLSSEDEELPCFQHLLFGKVNNIPSQSTRHSTVATECLSKNTEENLLSLKNSLNDCSNQVILAKASQEHHLSEETKCSASLFSSQCSELEDLTANTNTQDPFLIGSSKQMRHQSESQGVGLSDKELVSDDEERGTGLEENNQEEQSMDSNLGEAASGCESETSVSEDCSGLSSQSDILTTQQRDTMQHNLIKLQQEMAELEAVLEQHGSQPSNSYPSIISDSSALEDLRNPEQSTSEKAVLTSQKSSEYPISQNPEGLSADKFEVSADSSTSKNKEPGVERSSPSKCPSLDDRWYMHSCSGSLQNRNYPSQEELIKVVDVEEQQLEESGPHDLTETSYLPRQDLEGTPYLESGISLFSDDPESDPSEDRAPESARVGNIPSSTSALKVPQLKVAESAQSPAAAHTTDTAGYNAMEESVSREKPELTASTERVNKRMSMVVSGLTPEEFMLVYKFARKHHITLTNLITEETTHVVMKTDAEFVCERTLKYFLGIAGGKWVVSYFWVTQSIKERKMLNEHDFEVRGDVVNGRNHQGPKRARESQDRKIFRGLEICCYGPFTNMPTDQLEWMVQLCGASVVKELSSFTLGTGVHPIVVVQPDAWTEDNGFHAIGQMCEAPVVTREWVLDSVALYQCQELDTYLIPQIPHSHY

SEQ ID NO: 16306 - protein, 1816 aa, Homo sapiens
MLKLLNQKKGPSQCPLCKNDITKRSLQESTRFSQLVEELLKIICAFQLDTGLEYANSYNFAKKENNSPEHLKDEVSIIQSMGYRNRAKRLLQSEPENPSLQETSLSVQLSNLGTVRTLRTKQRIQPQKTSVYIELGSDSSEDTVNKATYCSVGDQELLQITPQGTRDEISLDSAKKAACEFSETDVTNTEHHQPSNNDLNTTEKRAAERHPEKYQGSSVSNLHVEPCGTNTHASSLQHENSSLLLTKDRMNVEKAEFCNKSKQPGLARSQHNRWAGSKETCNDRRTPSTEKKVDLNADPLCERKEWNKQKLPCSENPRDTEDVPWITLNSSIQKVNEWFSRSDELLGSDDSHDGESESNAKVADVLDVLNEVDEYSGSSEKIDLLASDPHEALICKSERVHSKSVESNIEDKIFGKTYRKKASLPNLSHVTENLIIGAFVTEPQIIQERPLTNKLKRKRRPTSGLHPEDFIKKADLAVQKTPEMINQGTNQTEQNGQVMNITNSGHENKTKGDSIQNEKNPNPIESLEKESAFKTKAEPISSSISNMELELNIHNSKAPKKNRLRRKSSTRHIHALELVVSRNLSPPNCTELQIDSCSSSEEIKKKKYNQMPVRHSRNLQLMEGKEPATGAKKSNKPNEQTSKRHDSDTFPELKLTNAPGSFTKCSNTSELKEFVNPSLPREEKEEKLETVKVSNNAEDPKDLMLSGERVLQTERSVESSSISLVPGTDYGTQESISLLEVSTLGKAKTEPNKCVSQCAAFENPKGLIHGCSKDNRNDTEGFKYPLGHEVNHSRETSIEMEESELDAQYLQNTFKVSKRQSFAPFSNPGNAEEECATFSAHSGSLKKQSPKVTFECEQKEENQGKNESNIKPVQTVNITAGFPVVGQKDKPVDNAKCSIKGGSRFCLSSQFRGNETGLITPNKHGLLQNPYRIPPLFPIKSFVKTKCKKNLLEENFEEHSMSPEREMGNENIPSTVSTISRNNIRENVFKEASSSNINEVGSSTNEVGSSINEIGSSDENIQAELGRNRGPKLNAMLRLGVLQPEVYKQSLPGSNCKHPEIKKQEYEEVVQTVNTDFSPYLISDNLEQPMGSSHASQVCSETPDDLLDDGEIKEDTSFAENDIKESSAVFSKSVQKGELSRSPSPFTHTHLAQGYRRGAKKLESSEENLSSEDEELPCFQHLLFGKVNNIPSQSTRHSTVATECLSKNTEENLLSLKNSLNDCSNQVILAKASQEHHLSEETKCSASLFSSQCSELEDLTANTNTQDPFLIGSSKQMRHQSESQGVGLSDKELVSDDEERGTGLEENNQEEQSMDSNLGEAASGCESETSVSEDCSGLSSQSDILTTQQRDTMQHNLIKLQQEMAELEAVLEQHGSQPSNSYPSIISDSSALEDLRNPEQSTSEKAVLTSQKSSEYPISQNPEGLSADKFEVSADSSTSKNKEPGVERSSPSKCPSLDDRWYMHSCSGSLQNRNYPSQEELIKVVDVEEQQLEESGPHDLTETSYLPRQDLEGTPYLESGISLFSDDPESDPSEDRAPESARVGNIPSSTSALKVPQLKVAESAQSPAAAHTTDTAGYNAMEESVSREKPELTASTERVNKRMSMVVSGLTPEEFMLVYKFARKHHITLTNLITEETTHVVMKTDAEFVCERTLKYFLGIAGGKWVVSYFWVTQSIKERKMLNEHDFEVRGDVVNGRNHQGPKRARESQDRKIFRGLEICCYGPFTNMPTDQLEWMVQLCGASVVKELSSFTLGTGVHPIVVVQPDAWTEDNGFHAIGQMCEAPVVTREWVLDSVALYQCQELDTYLIPQIPHSHY

SEQ ID NO: 16307 - protein, 1884 aa, Homo sapiens
MDLSALRVEEVQNVINAMQKILECPICLELIKEPVSTKCDHIFCKFCMLKLLNQKKGPSQCPLCKNDITKRSLQESTRFSQLVEELLKIICAFQLDTGLEYANSYNFAKKENNSPEHLKDEVSIIQSMGYRNRAKRLLQSEPENPSLQETSLSVQLSNLGTVRTLRTKQRIQPQKTSVYIELGSDSSEDTVNKATYCSVGDQELLQITPQGTRDEISLDSAKKAACEFSETDVTNTEHHQPSNNDLNTTEKRAAERHPEKYQGSSVSNLHVEPCGTNTHASSLQHENSSLLLTKDRMNVEKAEFCNKSKQPGLARSQHNRWAGSKETCNDRRTPSTEKKVDLNADPLCERKEWNKQKLPCSENPRDTEDVPWITLNSSIQKVNEWFSRSDELLGSDDSHDGESESNAKVADVLDVLNEVDEYSGSSEKIDLLASDPHEALICKSERVHSKSVESNIEDKIFGKTYRKKASLPNLSHVTENLIIGAFVTEPQIIQERPLTNKLKRKRRPTSGLHPEDFIKKADLAVQKTPEMINQGTNQTEQNGQVMNITNSGHENKTKGDSIQNEKNPNPIESLEKESAFKTKAEPISSSISNMELELNIHNSKAPKKNRLRRKSSTRHIHALELVVSRNLSPPNCTELQIDSCSSSEEIKKKKYNQMPVRHSRNLQLMEGKEPATGAKKSNKPNEQTSKRHDSDTFPELKLTNAPGSFTKCSNTSELKEFVNPSLPREEKEEKLETVKVSNNAEDPKDLMLSGERVLQTERSVESSSISLVPGTDYGTQESISLLEVSTLGKAKTEPNKCVSQCAAFENPKGLIHGCSKDNRNDTEGFKYPLGHEVNHSRETSIEMEESELDAQYLQNTFKVSKRQSFAPFSNPGNAEEECATFSAHSGSLKKQSPKVTFECEQKEENQGKNESNIKPVQTVNITAGFPVVGQKDKPVDNAKCSIKGGSRFCLSSQFRGNETGLITPNKHGLLQNPYRIPPLFPIKSFVKTKCKKNLLEENFEEHSMSPEREMGNENIPSTVSTISRNNIRENVFKEASSSNINEVGSSTNEVGSSINEIGSSDENIQAELGRNRGPKLNAMLRLGVLQPEVYKQSLPGSNCKHPEIKKQEYEEVVQTVNTDFSPYLISDNLEQPMGSSHASQVCSETPDDLLDDGEIKEDTSFAENDIKESSAVFSKSVQKGELSRSPSPFTHTHLAQGYRRGAKKLESSEENLSSEDEELPCFQHLLFGKVNNIPSQSTRHSTVATECLSKNTEENLLSLKNSLNDCSNQVILAKASQEHHLSEETKCSASLFSSQCSELEDLTANTNTQDPFLIGSSKQMRHQSESQGVGLSDKELVSDDEERGTGLEENNQEEQSMDSNLGEAASGCESETSVSEDCSGLSSQSDILTTQQRDTMQHNLIKLQQEMAELEAVLEQHGSQPSNSYPSIISDSSALEDLRNPEQSTSEKDSHIHGQRNNSMFSKRPREHISVLTSQKSSEYPISQNPEGLSADKFEVSADSSTSKNKEPGVERSSPSKCPSLDDRWYMHSCSGSLQNRNYPSQEELIKVVDVEEQQLEESGPHDLTETSYLPRQDLEGTPYLESGISLFSDDPESDPSEDRAPESARVGNIPSSTSALKVPQLKVAESAQSPAAAHTTDTAGYNAMEESVSREKPELTASTERVNKRMSMVVSGLTPEEFMLVYKFARKHHITLTNLITEETTHVVMKTDAEFVCERTLKYFLGIAGGKWVVSYFWVTQSIKERKMLNEHDFEVRGDVVNGRNHQGPKRARESQDRKIFRGLEICCYGPFTNMPTDQLEWMVQLCGASVVKELSSFTLGTGVHPIVVVQPDAWTEDNGFHAIGQMCEAPVVTREWVLDSVALYQCQELDTYLIPQIPHSHY

SEQ ID NO: 16308 - protein, 759 aa, Homo sapiens
MDLSALRVEEVQNVINAMQKILECPICLELIKEPVSTKCDHIFCKFCMLKLLNQKKGPSQCPLCKNDITKRSLQESTRFSQLVEELLKIICAFQLDTGLEYANSYNFAKKENNSPEHLKDEVSIIQSMGYRNRAKRLLQSEPENPSLQETSLSVQLSNLGTVRTLRTKQRIQPQKTSVYIELGSDSSEDTVNKATYCSVGDQELLQITPQGTRDEISLDSAKKAACEFSETDVTNTEHHQPSNNDLNTTEKRAAERHPEKYQGEAASGCESETSVSEDCSGLSSQSDILTTQQRDTMQHNLIKLQQEMAELEAVLEQHGSQPSNSYPSIISDSSALEDLRNPEQSTSEKVLTSQKSSEYPISQNPEGLSADKFEVSADSSTSKNKEPGVERSSPSKCPSLDDRWYMHSCSGSLQNRNYPSQEELIKVVDVEEQQLEESGPHDLTETSYLPRQDLEGTPYLESGISLFSDDPESDPSEDRAPESARVGNIPSSTSALKVPQLKVAESAQSPAAAHTTDTAGYNAMEESVSREKPELTASTERVNKRMSMVVSGLTPEEFMLVYKFARKHHITLTNLITEETTHVVMKTDAEFVCERTLKYFLGIAGGKWVVSYFWVTQSIKERKMLNEHDFEVRGDVVNGRNHQGPKRARESQDRKIFRGLEICCYGPFTNMPTDQLEWMVQLCGASVVKELSSFTLGTGVHPIVVVQPDAWTEDNGFHAIGQMCEAPVVTREWVLDSVALYQCQELDTYLIPQIPHSHY

SEQ ID NO: 16309 - protein, 699 aa, Homo sapiens
MDLSALRVEEVQNVINAMQKILECPICLELIKEPVSTKCDHIFCKFCMLKLLNQKKGPSQCPLCKNDITKRSLQESTRFSQLVEELLKIICAFQLDTGLEYANSYNFAKKENNSPEHLKDEVSIIQSMGYRNRAKRLLQSEPENPSLQETSLSVQLSNLGTVRTLRTKQRIQPQKTSVYIELGSDSSEDTVNKATYCSVGDQELLQITPQGTRDEISLDSAKKAACEFSETDVTNTEHHQPSNNDLNTTEKRAAERHPEKYQGEAASGCESETSVSEDCSGLSSQSDILTTQQRDTMQHNLIKLQQEMAELEAVLEQHGSQPSNSYPSIISDSSALEDLRNPEQSTSEKVLTSQKSSEYPISQNPEGLSADKFEVSADSSTSKNKEPGVERSSPSKCPSLDDRWYMHSCSGSLQNRNYPSQEELIKVVDVEEQQLEESGPHDLTETSYLPRQDLEGTPYLESGISLFSDDPESDPSEDRAPESARVGNIPSSTSALKVPQLKVAESAQSPAAAHTTDTAGYNAMEESVSREKPELTASTERVNKRMSMVVSGLTPEEFMLVYKFARKHHITLTNLITEETTHVVMKTDAEFVCERTLKYFLGIAGGKWVVSYFWVTQSIKERKMLNEHDFEVRGDVVNGRNHQGPKRARESQDRKIFRGLEICCYGPFTNMPTGCPPNCGCAARCLDRGQWLPCNWADV

SEQ ID NO: 16310 - protein, 339 aa, Homo sapiens
MAMQMQLEANADTSVEEESFGPQPISRLEQCGINANDVKKLEEAGFHTVEAVAYAPKKELINIKGISEAKADKILAEAAKLVPMGFTTATEFHQRRSEIIQITTGSKELDKLLQGGIETGSITEMFGEFRTGKTQICHTLAVTCQLPIDRGGGEGKAMYIDTEGTFRPERLLAVAERYGLSGSDVLDNVAYARAFNTDHQTQLLYQASAMMVESRYALLIVDSATALYRTDYSGRGELSARQMHLARFLRMLLRLADEFGVAVVITNQVVAQVDGAAMFAADPKKPIGGNIIAHASTTRLYLRKGRGETRICKIYDSPCLPEAEAMFAINADGVGDAKD

SEQ ID NO: 16311 - protein, 340 aa, Homo sapiens
MAMQMQLEANADTSVEEESFGPQPISRLEQCGINANDVKKLEEAGFHTVEAVAYAPKKELINIKGISEAKADKILTESRSVARLECNSVILVYCTLRLSGSSDSPASASRVVGTTGGIETGSITEMFGEFRTGKTQICHTLAVTCQLPIDRGGGEGKAMYIDTEGTFRPERLLAVAERYGLSGSDVLDNVAYARAFNTDHQTQLLYQASAMMVESRYALLIVDSATALYRTDYSGRGELSARQMHLARFLRMLLRLADEFGVAVVITNQVVAQVDGAAMFAADPKKPIGGNIIAHASTTRLYLRKGRGETRICKIYDSPCLPEAEAMFAINADGVGDAKD

SEQ ID NO: 16312 - protein, 280 aa, Homo sapiens
MAMQMQLEANADTSVEEESFGPQPISRLEQCGINANDVKKLEEAGFHTVEAVAYAPKKELINIKGISEAKADKILAEAAKLVPMGFTTATEFHQRRSEIIQITTGSKELDKLLQGGIETGSITEMFGEFRTGKTQICHTLAVTCQLPIDRGGGEGKAMYIDTEGTFRPERLLAVAERYGLSGSDVLDNVAYARAFNTDHQTQLLYQASAMMVESRYALLIVDSATALYRTDYSGRGELSARQMHLARFLRMLLRLADEIVSEERKRGNQNLQNLRLSLSS

SEQ ID NO: 16313 - DNA, 20 bp, Artificial Sequence
  Synthetic
aggccatcactaaaggcacc

SEQ ID NO: 16314 - DNA, 20 bp, Artificial Sequence
  Synthetic
taagccagtgccagaagagc

SEQ ID NO: 16315 - DNA, 42 bp, Artificial Sequence
  Synthetic
ccatctcatccctgcgtgtctccgaccaccagcagcctaagg

SEQ ID NO: 16316 - DNA, 47 bp, Artificial Sequence
  Synthetic
cctctctatgggcagtcggtgatggccatctattgcttacatttgct

SEQ ID NO: 16317 - DNA, 47 bp, Artificial Sequence
  Synthetic
tcatccacgttcaccttgccccacagggcagtaacggcagacttctc

SEQ ID NO: 16318 - RNA, 20 nt, Artificial Sequence
  Synthetic
guaacggcagacuucuccac

SEQ ID NO: 16319 - RNA, 20 nt, Artificial Sequence
  Synthetic
ccuguggggcaaggugaacg

SEQ ID NO: 16320 - RNA, 20 nt, Artificial Sequence
  Synthetic
ugaaguugguggugaggccc

SEQ ID NO: 16321 - DNA, 68 bp, Artificial Sequence
  Synthetic
ccaccaacttcatccacgttcaccttgccccacagggcagtaacggcagacttctcctcaggagtcag

SEQ ID NO: 16322 - DNA, 68 bp, Artificial Sequence
  Synthetic
ccaccaactgcatccacgttcactttgccccacagggcattgacagcagtcttctcctcaggagtcag

SEQ ID NO: 16323 - DNA, 67 bp, Artificial Sequence
  Synthetic
caccaccaacttcatccacgttcaccttgccccacagggcagtaacggcagacttctcctcaggagt

SEQ ID NO: 16324 - DNA, 67 bp, Artificial Sequence
  Synthetic
caccacgaacttcatccacgttaagcttgccctgcagggcagtaacggccgacttctccacacgagt

What is claimed is:

1. A method of modifying a target gene in a cell, the method comprising:
contacting the cell with a first gRNA molecule, a first enzymatically active Cas9 (eaCas9) molecule, a second gRNA molecule, and a second eaCas9 molecule;
wherein the first gRNA molecule and the first eaCas9 molecule associate with the target gene and generate a first single strand cleavage event on a first strand of the target gene;
wherein the second gRNA molecule and the second eaCas9 molecule associate with the target gene and generate a second single strand cleavage event on a second strand of the target gene, thereby forming a double strand break having a first overhang and a second overhang; and
wherein the first overhang and the second overhang in the target gene are repaired by gene conversion using an endogenous homologous region,
thereby modifying the target gene in the cell.

2. The method of claim 1, wherein, after repair of the first overhang and the second overhang, the target gene comprises the sequence of the endogenous homologous region.

3. The method of claim 1, wherein the cell is not contacted with an exogenous nucleic acid homologous to the endogenous target gene.

4. The method of claim 1, wherein the first overhang is a 5′ overhang, and the second overhang is a 5′ overhang.

5. The method of claim 1, wherein the method is used to correct a mutation in the target gene, and wherein the mutation in the target gene is located
(a) between the first single strand break and the second single strand break,
(b) within fewer than 50 nucleotides of the first single strand break, or
(c) within fewer than 50 nucleotides of the second single strand break.

6. The method of claim 1, wherein the target gene has at least 90% sequence homology with the endogenous homologous region.

7. The method of claim 1, wherein the first eaCas9 molecule is a first nickase molecule and the second eaCas9 molecule is a second nickase molecule.

8. The method of claim 7, wherein the first eaCas9 molecule and the second eaCas9 molecule are the same eaCas9 nickase molecule.

9. The method of claim 8, wherein the eaCas9 nickase molecule is an HNH-like domain nickase.

10. The method of claim 9, wherein the eaCas9 molecule comprises a mutation at an amino acid position corresponding to amino acid position D10 of Streptococcus pyogenes Cas9.

11. The method of claim 1, wherein the method is used to correct a mutation in the endogenous HBB target gene, and wherein the mutation in the endogenous HBB target gene causes sickle cell disease or beta-thalassemia.

12. The method of claim 11, wherein the first gRNA molecule is a gRNA molecule comprising SEQ ID NO:387, and wherein the second gRNA molecule is a gRNA molecule comprising SEQ ID NO:16318.

13. The method of claim 1, wherein the first gRNA molecule is a gRNA molecule comprising any one of SEQ ID NOs: 387-485, 6803-6871, or 16010-16256, and wherein the second gRNA molecule is a gRNA molecule comprising any one of SEQ ID NOs: 387-485, 6803-6871, or 16010-16256.

14. The method of claim 1, wherein the cell is a population of cells, and wherein the first overhang and the second overhang in the target gene are repaired by gene conversion in about 12% to about 45% of the cells in the population of cells.

15. The method of claim 1, wherein the cell is a population of cells, and wherein the first overhang and the second overhang in the target gene are repaired by non-homologous end joining (NHEJ) in less than 40% of the cells in the population of cells.

16. The method of claim 1, wherein the cell is a mammalian cell.

17. The method of claim 16, wherein the cell is a human cell.

18. The method of claim 1, wherein the cell is a blood cell or a stem cell.

19. A composition comprising:
a first non-naturally occurring gRNA molecule,
a first non-naturally occurring enzymatically active Cas9 (eaCas9) molecule,
a second non-naturally occurring gRNA molecule, and
a second non-naturally occurring eaCas9 molecule;
wherein the first gRNA molecule and the first eaCas9 molecule are designed to associate with a target gene and generate a first single strand cleavage event on a first strand of the target gene;
wherein the second gRNA molecule and the second eaCas9 molecule are designed to associate with the target gene and generate a second single strand cleavage event on a second strand of the target gene, thereby forming a first overhang and a second overhang; and
wherein the first gRNA molecule, the first eaCas9 molecule, the second gRNA molecule and the second eaCas9 molecule are designed such that the first overhang and the second overhang in the target gene are repaired by gene conversion.

20. The composition of claim 19, wherein the first non-naturally occurring eaCas9 molecule is an HNH-like domain nickase, and wherein the second non-naturally occurring eaCas9 molecule is an HNH-like domain nickase.

21. The composition of claim 19, wherein the first non-naturally occurring gRNA molecule comprises SEQ ID NO:387, and wherein the second non-naturally occurring gRNA molecule comprises SEQ ID NO:16318.

22. The composition of claim 19, wherein the first gRNA molecule is a gRNA molecule comprising any one of SEQ ID NOs: 387-485, 6803-6871, or 16010-16256, and wherein the second gRNA molecule is a gRNA molecule comprising any one of SEQ ID NOs: 387-485, 6803-6871, or 16010-16256.

23. A method of treating a disease in a subject having a mutation in an endogenous HBB target gene, the method comprising
contacting a cell from the subject with a first gRNA molecule, a first enzymatically active Cas9 (eaCas9) molecule, a second gRNA molecule, and a second eaCas9 molecule;
wherein the first gRNA molecule and the first eaCas9 molecule associate with the HBB target gene and generate a first single strand cleavage event on a first strand of the HBB target gene;
wherein the second gRNA molecule and the second eaCas9 molecule associate with the HBB target gene and generate a second single strand cleavage event on a second strand of the HBB target gene, thereby forming a double strand break having a first overhang and a second overhang; and
wherein the first overhang and the second overhang in the HBB target gene are repaired by gene conversion using an endogenous homologous region of an endogenous HBD gene which does not comprise the mutation, correcting the mutation in the endogenous HBB target gene in the cell,
thereby treating the disease in the subject having the mutation in the endogenous HBB target gene.

24. The method of claim 23, wherein the cell is not contacted with an exogenous nucleic acid homologous to the HBB target gene.

25. The method of claim 23, wherein the first eaCas9 molecule and the second eaCas9 molecule are each Cas9 nickase molecules.

26. The method of claim 25, wherein the first eaCas9 molecule and the second eaCas9 molecule are the same species of eaCas9 nickase molecule.

27. The method of claim 26, wherein the eaCas9 nickase molecule comprises a mutation at an amino acid position corresponding to amino acid position D10 of Streptococcus pyogenes Cas9.

28. The method of claim 23, wherein the disease is beta thalassemia or sickle cell disease.

29. The method of claim 23, wherein the cell is a blood cell or a stem cell.

30. The method of claim 23, wherein the contacting step is performed ex vivo or in vivo.

31. A cell altered by the method of claim 1.

32. A pharmaceutical composition comprising the cell of claim 31.

33. A method of modifying a target region of a target gene in a mammalian cell, the method comprising:
generating, within the cell, a first single strand break on a first strand of the target gene and second single strand break on a second strand of the target gene, thereby forming a double strand break in the target gene having a first 5′ overhang and a second 5′ overhang;
wherein the target region of the target gene is located
(a) between the first single strand break and the second single strand break,
(b) within fewer than 50 nucleotides of the first single strand break, or
(c) within fewer than 50 nucleotides of the second single strand break;
wherein the double strand break is repaired by gene conversion,
thereby modifying the target region of the target gene in the mammalian cell.

34. The method of claim 33, wherein the step of generating the first single strand break and the second single strand break comprises contacting the cell with at least one eaCas9 molecule, a first gRNA molecule, and a second gRNA molecule.

35. The method of claim 34, wherein the first gRNA molecule and the at least one eaCas9 molecule associate with the target gene and generate the first single strand break, and wherein the second gRNA molecule and the at least one eaCas9 molecule associate with the target gene and generate the second single strand break.

36. The method of claim 33, wherein the double strand break is repaired by gene conversion using an endogenous homologous region.

37. The method of claim 36, wherein the endogenous homologous region is located within a gene cluster comprising the target gene.

38. The method of claim 36, wherein the target gene is an HBB gene, and wherein the endogenous homologous region is a region of an HBD gene.

39. The method of claim 38, wherein the first gRNA molecule comprises a targeting sequence comprising SEQ ID NO:387 and the second gRNA molecule comprises a targeting sequence comprising SEQ ID NO:16318.

40. The method of claim 35, wherein the at least one eaCas9 molecule is at least one eaCas9 nickase molecule.

41. The method of claim 40, wherein the at least one eaCas9 nickase molecule is at least one HNH-type nickase molecule.

42. A method of increasing the percentage of cells in a population of cells that modify a target region of a target gene by gene conversion using an endogenous homologous region, the method comprising
contacting the population of cells with a first gRNA molecule, a first enzymatically active Cas9 (eaCas9) molecule, a second gRNA molecule, and a second eaCas9 molecule;
wherein the first gRNA molecule and the first eaCas9 molecule associate with the target gene and generate a first single strand cleavage event on a first strand of the target gene;
wherein the second gRNA molecule and the second eaCas9 molecule associate with the target gene and generate a second single strand cleavage event on a second strand of the target gene, thereby forming a double strand break having a first 5′ overhang and a second 5′ overhang; and
wherein the first 5′ overhang and the second 5′ overhang in the target gene are repaired by gene conversion using the endogenous homologous region,
thereby increasing the percentage of cells in the population of cells that modify the target region of the target gene by gene conversion using the endogenous homologous region.

43. The method of claim 42, wherein the first 5′ overhang and the second 5′ overhang in the target gene are repaired by gene conversion in about 12% to about 45% of the cells in the population of cells.

44. The method of claim 42, wherein the percentage of cells in the population of cells that modify the target region of the target gene by gene conversion using the endogenous homologous region is increased, as compared to a percentage of cells in a population of cells which would modify the target region of the target gene by gene conversion using the endogenous homologous region in the absence of the contacting.

45. The method of claim 42, wherein the percentage of cells in the population of cells that modify the target region of the target gene by gene conversion using the endogenous homologous region is increased, as compared to a percentage of cells in a population of cells which would modify the target region of the target gene by gene conversion using the endogenous homologous region after contacting the population of cells with a first gRNA molecule, a first enzymatically active Cas9 (eaCas9) molecule, a second gRNA molecule, and a second eaCas9 molecule which would generate a first 3′ overhang and a second 3′ overhang in the target gene.

46. The method of claim 42, wherein the percentage of cells in the population of cells that modify the target region of the target gene by gene conversion using the endogenous homologous region is increased, as compared to a percentage of cells in a population of cells which would modify the target region of the target gene by gene conversion using the endogenous homologous region after contacting the population of cells with a first gRNA molecule, a first enzymatically active Cas9 (eaCas9) molecule, a second gRNA molecule, and a second eaCas9 molecule which would generate a double strand blunt end brake in the target gene.
